(19) United States
(12) Patent Application Publication
(10) Pub. No.: US 2021/0260176 A1
(43) Pub. Date: Aug. 26, 2021

(54) Methods and Compositions for Vaccinating Against Malaria

(71) Applicant: THE HENRY M. JACKSON FOUNDATION FOR THE ADVANCEMENT OF MILITARY MEDICINE, INC., Bethesda, MD (US)

(72) Inventors: Joao Carlos Aguiar, Potomac, MD (US); Keith Limbach, Gaithersburg, MD (US); Emily Smith, Silver Spring, MD (US)

(73) Assignee: United States of America as Represented by the Secretary of the Navy, Silver Spring, MD (US)

(21) Appl. No.: 16/497,244

(22) PCT Filed: Mar. 30, 2018
(86) PCT No.: PCT/US18/25510

§ 371 Date: Sep. 24, 2019

Related U.S. Application Data
(60) Provisional application No. 62/479,018, filed on Mar. 30, 2017.

(51) Int. Cl. A61K 39/015; A61P 33/06

(52) U.S. Cl. CPC A61K 39/015; A61K 2039/53; A61P 33/06

(57) ABSTRACT

The present invention provides methods and compositions for immunizing a subject against malaria.

### CROSS REFERENCE TO RELATED APPLICATIONS

[0001] The present application is a national phase entry under 35 U.S.C § 371 of International Application No. PCT/US2018/025510 filed Mar. 30, 2018, published in English, which claims priority to U.S. Provisional Application No. 62/479,018 filed Mar. 30, 2017, all of which are incorporated herein by reference.

### REFERENCE TO SEQUENCE LISTING

[0002] A computer readable text file, entitled “SequenceListing.text,” created on or about Mar. 27, 2018 with a file size of about 593 KB contains the sequence listing for this application and is hereby incorporated by reference herein in its entirety.

### BACKGROUND OF THE INVENTION

[0003] Almost all licensed vaccines are thought to mediate protection through antibody production; therefore, antigen discovery research and development has focused largely on the identification of antigens that induce protective antibodies. The availability of serum, the ease of working with antibodies, and, more recently, advances in microarray technology have facilitated these efforts. However, vaccine development for some of the most devastating infectious diseases, such as malaria, tuberculosis (TB), and HIV, has met with limited success, partially because these organisms have intracellular life cycle stages that are not targeted by antibodies, and they have developed sophisticated mechanisms to avoid clearance by host immune responses. Since T cells have been implicated in protection from these diseases, considerable efforts have been directed at developing vaccines that induce protective T cell responses. However, for infectious agents with large genomes that express many potential T cell antigens such as parasites and bacteria, many of the specific antigens that are targeted by protective CD8+ T cells are not known. Identification of the target antigens of protective T cell responses would greatly facilitate vaccine development.

[0004] Malaria killed approximately 429,000 people in 2015, most of them children in sub-Saharan Africa. Despite decades of effort, a highly effective malaria vaccine is not available. Immunization with attenuated Plasmodium sporozoites can provide high levels of protection in mice, non-human primates, and humans. Protection is mediated by CD8+ T cells, which target a set of mostly unknown pre-erythrocytic stage antigens. Activated CD8+ T cells can kill infected hepatocytes, thereby preventing blood-stage infection, which is responsible for the clinical symptoms of the disease. However, substantial delivery issues are a considerable barrier to licensure of live sporozoite-based vaccines, and broad protection against circulating strains has not been demonstrated. An alternative approach is to identify the targets of these protective CD8+ T cell responses and formulate them into a multivalent subunit vaccine designed to induce sustained T cell immunity.

[0005] The two P. falciparum sporozoite vaccines that are associated with high levels of protection in humans are radiation-attenuated sporozoites (RAS) and live sporozoites with concomitant chloroquine treatment to kill newly emerging blood-stage parasites (SPZ+CQ). Immunization with RAS leads to infection of hepatocytes and expression of a set of early liver-stage genes, but these attenuated sporozoites do not develop into late liver and blood stages. In BALB/c mice, the protective T cell response following vaccination with RAS is dominated by CD8+ T cells specific for the major surface protein on the sporozoite, the circumsporozoite protein (CSP), although T cell responses specific for other antigens can also contribute to protection. In humans, T cell responses specific for several antigens have been observed following RAS immunization. In contrast to RAS, vaccination with SPZ+CQ allows expression of the full repertoire of liver-stage genes and replication of the parasite in hepatocytes. Unlike RAS, where protection requires approximately 1,000 bites from infected mosquitoes, SPZ+CQ can provide durable protection in volunteers with as few as 30-45 bites. This robust protection is strictly dependent on CD8+ T cells and immune response to CSP is not required, highlighting the fact that the specific antigen targets of protective immunity are not known.

[0006] Pre-erythrocytic antigens, which are expressed in the sporozoite and liver stages of the Plasmodium spp. life cycle, are particularly promising targets for malaria vaccine development, with great potential to prevent infection and transmission. The pre-erythrocytic stages of the parasitic life cycle are vulnerable to vaccine intervention because their antigens are expressed at a time when low numbers of sporozoites are transmitted by the mosquito to the human host and only a few hepatocytes become infected.

[0007] Herein is described a novel platform for the discovery of antigens that are the targets of T cell responses to infection (FIG. 1). Using this system, pre-erythrocytic antigens are identified that were targeted by CD8+ T cell responses in mice immunized with protective regimens of P. yoelii SPZ+CQ. Moreover, it is demonstrated that an antigen that recalled a high frequency of interferon gamma (IFNγ)-expressing CD8+ T cells, PY03674, provided sterile protection in mice when delivered in a DNA prime-adenovector boost regimen.

### SUMMARY OF THE INVENTION

[0008] The present invention provides methods and compositions for immunizing a subject against malaria, with the methods comprising administering an immunologically effective amount of at least one antigenic polypeptide having an amino acid sequence that is at least 90, 95 or 100% identical to an amino acid sequence selected from the group consisting of SEQ ID NO:1, SEQ ID NO:2, SEQ ID NO:3, SEQ ID NO:4, SEQ ID NO:5, SEQ ID NO:6, SEQ ID NO:7, SEQ ID NO:8, SEQ ID NO:9, SEQ ID NO:10, SEQ ID NO:11, SEQ ID NO:12, SEQ ID NO:13, SEQ ID NO:14, SEQ ID NO:15, SEQ ID NO:16, SEQ ID NO:17, SEQ ID NO:40, NO:41, SEQ ID NO:42, SEQ ID NO:43, SEQ ID NO:44, SEQ ID NO:45, SEQ ID NO:46, SEQ ID NO:47, SEQ ID NO:48, SEQ ID NO:49, SEQ ID NO:50, NO:51, SEQ ID NO:52, SEQ ID NO:53, SEQ ID NO:54, SEQ ID NO:55, SEQ ID NO:56, SEQ ID NO:57, SEQ ID NO:58, SEQ ID NO:59, SEQ ID NO:60, NO:61, SEQ ID NO:62, SEQ ID NO:63, SEQ ID NO:64, and SEQ ID NO:65, SEQ ID NO:66, SEQ ID NO:67, SEQ ID NO:68, SEQ ID NO:69, SEQ ID NO:70, NO:71, SEQ ID NO:72, SEQ ID NO:73, SEQ ID NO:74, SEQ ID NO:75, SEQ ID NO:76, SEQ ID NO:77, SEQ ID NO:78, SEQ ID NO:79, SEQ ID NO:80, NO:81, SEQ ID NO:82, SEQ ID NO:83, SEQ ID NO:84, SEQ ID NO:85, SEQ ID NO:86, SEQ ID NO:87, SEQ ID NO:88, SEQ ID NO:89, SEQ ID NO:90, NO:91, SEQ ID NO:92, SEQ ID NO:93, SEQ ID NO:94, SEQ ID NO:95, SEQ ID NO:96, SEQ ID NO:97, SEQ ID NO:98, SEQ ID NO:99, NO:100, SEQ ID NO:101, SEQ ID NO:102, SEQ ID NO:103, SEQ ID NO:104, SEQ ID NO:105 and SEQ ID NO:106.

### BRIEF DESCRIPTION OF THE DRAWINGS

[0009] FIG. 1 depicts a schematic view of high-throughput Ad-array generation and antigen identification assays. The general steps involved in the generating a defined array of adenovectors and their use in antigen discovery screens using high-throughput technology are indicated.

[0010] FIG. 2 depicts generation of the Ad-array. (A) >300 highly expressed malaria pre-erythrocytic genes were amplified using P. yoelii genomic DNA and gene-specific primers. The reaction products were electrophoresed on 1% agarose gels with a 1 KB ladder as shown here for a subset of these genes. The control is a pair of oligos used to amplify the E1 region of Ad5 DNA. (B) Parallel generation of two Ad-array vectors in multi-well plates. The schematic indicates two pAdFlex plasmids (pAdgPyHep17 and pAdgCMVp65), which were linearized with Pac I and transfected into 293 cells in 60 mm, 6 well, 12 well, 24, well, 48 well and 96 well plates. Following two passages in 293 cells in the same plate size, CPE was observed in all wells. Viral DNA was obtained, and PCR analysis was performed using primers that flank the expression cassette. The products of the PCR reaction were loaded into a 1% agarose gel and electrophoresed. Arrows next to AdgPyHep17 and AdgCMVp65 indicate the expected size for the PCR products. Plate sizes used to generate the recombinant adenovectors are indicated.

[0011] FIG. 3 depicts that adenovector expressed antigens are effective at recalling T cell responses from immunized mice. (A) Schema for in vitro antigen discovery. (8) Ad5 vector effectively transduces APC.A20 cells that were infected with AdGFP at the indicated MOI. The percentage of GFP positive cells was determined by FACS. (C) AdPyCSP infected APCs can recall CD8+ T cell responses from mice immunized using a PyCSP DNA vaccine. Target A20 cells were infected with various MOI of an Ad5 vector expressing PyCSP (AdPyCSP). Control targets were uninfected A20 cells, A20 cells infected with various MOI of an Ad5 vector that does not express a transgene (AdNull) and A20 cells stimulated with an immunodominant PyCSP peptide. These targets were used to stimulate splenocytes from BALB/c mice immunized with a PyCSP DNA vaccine. IFNα expressing cells were measured by ELispot. SFC (Spot Forming Cells); error bars indicate the standard error of the mean, n=3.

[0012] FIG. 4 depicts that adenovector expressed antigens are effective at recalling CD8+ T cell responses from mice immunized with protective regimens of sporozoite vaccines. Target A20 cells were infected with Ad5 vector (either triple CsCh purified AdPyCSP or unpurified cell lysate from AdPyCSP infected cells) at the indicated MOI and incubated with splenocytes from RAS immunized mice. Control targets were A20 cells infected with AdNull, AdGFP and uninfected A20 cells. (a) IFNγ+ cells were measured by ELISpot. SFC (Spot Forming Cells), (b) CD8+ IFNγ+ cells were measured by ICS staining and FACS analysis. Control targets were A20 cells infected with AdNull vectors and uninfected A20 cells. (c) Comparison of Ad-array PyCSP (AdgPyCSP) with AdPyCSP, which does not contain the recombination motifs flanking the expression cassette. CD8+ IFNγ+ cells were measured by ICS staining and FACS analysis. Controls targets were A20 cells infected with AdGFP vectors and uninfected A20 cells. (d) Dose response analysis for efficacy of SPZ+CQ vaccine regimen. (e) AdPyCSP infected cells can recall CD8+ T cell responses from mice immunized with SPZ+CQ. Target A20 cells were infected with the indicated Ad vectors and antigen specific CD8+ T cell responses were measured. Error bars indicate the standard error of the mean, n=3. The asterisks indicate statically significant differences compared with A20 controls (p<0.05 by ANOVA with Bonferroni means comparison test).

[0013] FIG. 5 depicts the identification of targets of CD8+ T cell responses induced by highly protective SPZ+CQ vaccine regimen. Splenocytes from BALB/c mice immunized with SPZ+CQ were screened for CD8+ recall responses specific for 312 pre-erythrocytic antigens. The mean of the negative controls is indicated by the horizontal line. The dotted line indicates responses that are >2 SD above the mean of the negative controls.

[0014] FIG. 6 depicts that the P. falciparum Ortholog of PY03674, PF3D7_0725100 (SEQ ID NO.: 17), Is Immunogenic in BALB/c Mice. Mice were immunized with 1×10⁹ PU of GC46.PF3D7_0725100 or a control adenovector that does not express a transgene, GC46.Null. Three weeks post-immunization, mice were euthanized and PF3D7_0725100-specific CD8+(A) and CD4+(8) T cell responses were measured by intracellular cytokine staining and flow cytometry following 4-hr stimulation using pooled overlapping 15-mer peptides.

[0015] FIG. 7 depicts identification of protective and immunogenic antigens using a matrix format. (A) Antigens (numbered 1-9) are grouped into six pools of three antigens (labeled A-F). Each antigen is present in two pools. For example, Antigen 9 is in both pools C (with 7 and 8) and F (with 3 and 6). Each pool is tested alone, and also in combination with PyCSP; therefore, each antigen is tested in four groups of mice. (B and C) CD1 mice are immunized with DNA (a pool of three antigen-expressing constructs with or without PyCSP) followed by Ad5-boost at six weeks with pooled vectors expressing the corresponding antigens. Null-immunized (4×, matching the largest dose) and naïve mice are also included as negative controls, and PyCSP alone is included as a positive control. (B) Two weeks following immunization, mice are challenged with 300 infectious P. yoelii sporozoites. Sterile protection is assessed by blood smear. (C) Two weeks following immunization, mice are challenged with 10,000 Infectious P. yoelii sporozoites by intravenous injection. Forty-two hours after challenge, mice are euthanized and livers harvest for immunological analyses and assessment of protection by quantification of liver parasite burden.

[0016] FIG. 8 depicts the use of matrices comprised of pooled adenovectors to identify T-cell antigens. Groups of 14 CD1 mice were immunized with DNA/HuAd5 vectors expressing groups of P. yoelii antigens, as described in FIG. 7. All mice were IV challenged with 300 non-lethal 17XNL P. yoelii sporozoites.

### DETAILED DESCRIPTION OF THE INVENTION

[0017] The present invention provides methods and compositions for immunizing a subject against malaria, with the methods comprising administering at least one antigenic polypeptide having an amino acid sequence that is at least 90, 95 or 100% identical to an amino acid sequence selected from the group consisting of SEQ ID NO:1, SEQ ID NO:2, SEQ ID NO:3, SEQ ID NO:4, SEQ ID NO:5, SEQ ID NO:6, SEQ ID NO:7, SEQ ID NO:8, SEQ ID NO:9, SEQ ID NO:10, SEQ ID NO:11, SEQ ID NO:12, SEQ ID NO:13, SEQ ID NO:14, SEQ ID NO:15, SEQ ID NO:16, SEQ ID NO:17, SEQ ID NO:40, NO:41, SEQ ID NO:42, SEQ ID NO:43, SEQ ID NO:44, SEQ ID NO:45, SEQ ID NO:46, SEQ ID NO:47, SEQ ID NO:48, SEQ ID NO:49, SEQ ID NO:50, NO:51, SEQ ID NO:52, SEQ ID NO:53, SEQ ID NO:54, SEQ ID NO:55, SEQ ID NO:56, SEQ ID NO:57, SEQ ID NO:58, SEQ ID NO:59, SEQ ID NO:60, NO:61, SEQ ID NO:62, SEQ ID NO:63, SEQ ID NO:64, and SEQ ID NO:65, SEQ ID NO:66, SEQ ID NO:67, SEQ ID NO:68, SEQ ID NO:69, SEQ ID NO:70, NO:71, SEQ ID NO:72, SEQ ID NO:73, SEQ ID NO:74, SEQ ID NO:75, SEQ ID NO:76, SEQ ID NO:77, SEQ ID NO:78, SEQ ID NO:79, SEQ ID NO:80, NO:81, SEQ ID NO:82, SEQ ID NO:83, SEQ ID NO:84, SEQ ID NO:85, SEQ ID NO:86, SEQ ID NO:87, SEQ ID NO:88, SEQ ID NO:89, SEQ ID NO:90, NO:91, SEQ ID NO:92, SEQ ID NO:93, SEQ ID NO:94, SEQ ID NO:95, SEQ ID NO:96, SEQ ID NO:97, SEQ ID NO:98, SEQ ID NO:99, NO:100, SEQ ID NO:101, SEQ ID NO:102, SEQ ID NO:103, SEQ ID NO:104, SEQ ID NO:105 and SEQ ID NO:106.

[0018] The present invention provides the use of compositions for immunizing a subject against malaria, with the use comprising administering at least one antigenic polypeptide having an amino acid sequence that is at least 90, 95 or 100% identical to an amino acid sequence selected from the group consisting of SEQ ID NO:1, SEQ ID NO:2, SEQ ID NO:3, SEQ ID NO:4, SEQ ID NO:5, SEQ ID NO:6, SEQ ID NO:7, SEQ ID NO:8, SEQ ID NO:9, SEQ ID NO:10, SEQ ID NO:11, SEQ ID NO:12, SEQ ID NO:13, SEQ ID NO:14, SEQ ID NO:15, SEQ ID NO:16, SEQ ID NO:17, SEQ ID NO:40, NO:41, SEQ ID NO:42, SEQ ID NO:43, SEQ ID NO:4, SEQ ID NO:45, SEQ ID NO:46, SEQ ID NO:47, SEQ ID NO:48, SEQ ID NO:49, SEQ ID NO:50, NO:51, SEQ ID NO:52, SEQ ID NO:53, SEQ ID NO:54, SEQ ID NO:55, SEQ ID NO:56, SEQ ID NO:57, SEQ ID NO:58, SEQ ID NO:59, SEQ ID NO:60, NO:61, SEQ ID NO:62, SEQ ID NO:63, SEQ ID NO:64, and SEQ ID NO:65, SEQ ID NO:66, SEQ ID NO:67, SEQ ID NO:68, SEQ ID NO:69, SEQ ID NO:70, NO:71, SEQ ID NO:72, SEQ ID NO:73, SEQ ID NO:74, SEQ ID NO:75, SEQ ID NO:76, SEQ ID NO:77, SEQ ID NO:78, SEQ ID NO:79, SEQ ID NO:80, NO:81, SEQ ID NO:82, SEQ ID NO:83, SEQ ID NO:84, SEQ ID NO:85, SEQ ID NO:86, SEQ ID NO:87, SEQ ID NO:88, SEQ ID NO:89, SEQ ID NO:90, NO:91, SEQ ID NO:92, SEQ ID NO:93, SEQ ID NO:94, SEQ ID NO:95, SEQ ID NO:96, SEQ ID NO:97, SEQ ID NO:98, SEQ ID NO:99, NO:100, SEQ ID NO:101, SEQ ID NO:102, SEQ ID NO:103, SEQ ID NO:104, SEQ ID NO:105 and SEQ ID NO:106.

[0019] The present invention provides use of compositions comprising at least one antigenic polypeptide having an amino acid sequence that is at least 90, 95 or 100% identical to an amino acid sequence selected from the group consisting of SEQ ID NO:1, SEQ ID NO:2, SEQ ID NO:3, SEQ ID NO:4, SEQ ID NO:5, SEQ ID NO:6, SEQ ID NO:7, SEQ ID NO:8, SEQ ID NO:9, SEQ ID NO:10, SEQ ID NO:11, SEQ ID NO:12, SEQ ID NO:13, SEQ ID NO:14, SEQ ID NO:15, SEQ ID NO:16, SEQ ID NO:17, SEQ ID NO:40, NO:41, SEQ ID NO:42, SEQ ID NO:43, SEQ ID NO:4, SEQ ID NO:45, SEQ ID NO:46, SEQ ID NO:47, SEQ ID NO:48, SEQ ID NO:49, SEQ ID NO:50, NO:51, SEQ ID NO:52, SEQ ID NO:53, SEQ ID NO:54, SEQ ID NO:55, SEQ ID NO:56, SEQ ID NO:57, SEQ ID NO:58, SEQ ID NO:59, SEQ ID NO:60, NO:61, SEQ ID NO:62, SEQ ID NO:63, SEQ ID NO:64, and SEQ ID NO:65, SEQ ID NO:66, SEQ ID NO:67, SEQ ID NO:68, SEQ ID NO:69, SEQ ID NO:70, NO:71, SEQ ID NO:72, SEQ ID NO:73, SEQ ID NO:74, SEQ ID NO:75, SEQ ID NO:76, SEQ ID NO:77, SEQ ID NO:78, SEQ ID NO:79, SEQ ID NO:80, NO:81, SEQ ID NO:82, SEQ ID NO:83, SEQ ID NO:84, SEQ ID NO:85, SEQ ID NO:86, SEQ ID NO:87, SEQ ID NO:88, SEQ ID NO:89, SEQ ID NO:90, NO:91, SEQ ID NO:92, SEQ ID NO:93, SEQ ID NO:94, SEQ ID NO:95, SEQ ID NO:96, SEQ ID NO:97, SEQ ID NO:98, SEQ ID NO:99, NO:100, SEQ ID NO:101, SEQ ID NO:102, SEQ ID NO:103, SEQ ID NO:104, SEQ ID NO:105 and SEQ ID NO:106 for the manufacture of a medicament for the treatment of malaria.

[0020] The polypeptides disclosed herein are or possess novel antigens, or are orthologs thereof, that display a positive reaction to at least one of two types of screening assays for antigenicity. It is possible that the polypeptides, antigenic fragments thereof and/or orthologs thereof, also display a positive reaction to additional screening assays for antigenicity. For example, as noted in the examples, the polypeptides or fragments thereof can promote or provide a positive stimulus in an antigenic screening assay comprising flow cytometry (FACS) identification of lymphocytes stimulated in vitro with splenocytes from vaccinated animals, or the polypeptides or fragments thereof can provide or promote a positive stimulus in an antigenic screening assay comprising Enzyme-linked ImmunoSpot (EliSpot) identification of lymphocytes stimulated in vitro with splenocytes from vaccinated animals. In either screening assay, modified parasites containing the polypeptides or fragments thereof are administered to an animal with a spleen, and the spenocytes are subsequently harvested and screened for their ability to stimulate production of antigenic substances, such as but not limited to interferon gamma (IFNγ), interleukin-2 (IL-2), from lymphocytes in vitro. Accordingly, the invention is directed to polypeptides or fragments thereof that promote a positive in vitro antigenic response in lymphocytes. The phrase “promoting a positive antigenic response” is used herein to mean the polypeptides or fragments thereof can cause production of antigenic substances from lymphocytes, either directly or indirectly, such as using stimulated splenocytes as described above.

[0021] In one embodiment, the polypeptides disclosed herein are novel antigens, or the orthologs thereof, that have also been shown to induce an “antibody response” and/or a “cellular immune response” in mice immunized with radiation-attenuated sporozoites (RAS) from Plasmodium yoelii. Accordingly, the present invention provides methods of inducing an antibody response in a subject in need thereof comprising administering at least one of the polypeptides or the antigenic fragment thereof to a subject capable of producing an antibody response. The present invention also provides methods of inducing a cellular immune response in a subject in need thereof comprising administering at least one of the polypeptides or the antigenic fragment thereof to the subject.

[0022] As used herein, an “antibody response” is used as it is in the art. Namely, an antibody response occurs when a subject's immune system produces antibodies that bind specifically to an antigen upon being exposed to the antigen. The antibodies may be free in the subject's blood plasma, or the antibodies may be membrane-bound, which are often referred to as “B cell receptors” (BCRs). An antibody response, as used herein, may include production of free antibodies found in blood, tissue or other body fluids, or the antibody response may include production of membrane-bound antibodies, or both.

[0023] As used herein a “cellular immune response” or “cell mediated immunity” is an immune response in a subject that does not involve antibodies. In general, a cellular immune response includes activation of specific cell types, such as but not limited to phagocytes, and T cells, as well as release of various cytokines from immune cells. Examples of cytokines that are expressed or released during a cell-mediated immune response include but are not limited to interleukin 1 (IL-1), IL-6, IL-12, IL-16, tumor necrosis factor alpha (TNFα), interferon alpha (IFNα), IFN beta (IFNβ), IFN gamma (IFNγ), transforming growth factor beta (TGFβ), IL-4, IL-10 and IL-13.

[0024] As used herein, the terms “protein” and “peptide” are used interchangeably and simply used to denote at least a polymer, branched or unbranched, of amino acid residues. As used herein, the term “isolated,” when used in conjunction with proteins and nucleic acids, is used to indicate that the proteins or nucleic acids are present in a form in which the protein does not naturally occur. For example, the antigenic proteins of the present application are proteins that naturally occur in P. falciparum and/or P. yoelii.

[0025] Of course, the isolated antigenic proteins or fragments described herein can be purified or substantially purified. As used herein, the term “purified” when used in reference to a protein or nucleic acid, means that the concentration of the molecule being purified has been increased relative to other molecules associated with it in its natural environment, or environment in which it was produced, found or synthesized. One of skill in the art would recognize that these “other molecules” might include proteins, nucleic acids, lipids and sugars but generally do not include water, solvents, buffers, and reagents added to maintain the integrity or facilitate the purification of the molecule being purified. For example, even if a protein is diluted with an aqueous solvent during affinity chromatography, the proteins are purified by this chromatography if other naturally associated molecules do not bind to the column and are separated from the subject proteins. According to this definition, a substance may be 5% or more, 10% or more, 20% or more, 30% or more, 40% or more, 50% or more, 60% or more, 70% or more, 80% or more, 90% or more, 95% or more, 98% or more, 99% or more, or 100% pure when considered relative to its contaminants.

[0026] The term “fragment,” when used in connection with a protein, is used to mean a peptide that contains a sequence of contiguous amino acids taken from the full length or mature antigenic proteins. In specific embodiments, the antigenic protein fragments of the present invention comprise or alternatively consist of sequences of contiguous amino acids that are about 0.01 to 0.05, 0.1 to 0.5, 1 to 5, 5 to 10, 10 to 15, 15 to 20, 20 to 25, 25 to 30, 30 to 35, 35 to 40, 40 to 45, 45 to 50, 50 to 55, 55 to 60, 60 to 65, 65 to 70, 70 to 75, 75 to 80, 80 to 85, 85 to 90, 90 to 95 or about 95 to 100 percent of the full length amino acid sequences disclosed herein.

[0027] The fragments of the antigenic proteins may or may not possess similar antigenicity as the full length antigenic proteins. In one embodiment, the fragments of the present invention are antigenic. In another embodiment, the fragments of the present invention are immunogenic. For example, the polypeptides of the invention may be immunologically cross-reactive and may be capable of eliciting in an animal an immune response to P. falciparum, P. vivax or P. yoelii, or infected cells thereof or antigen presenting cells expressing P. falciparum or P. yoelii antigens and/or are able to be bound by anti-protein antibodies. As used herein the term “antigenic” refers to a substance such as a peptide or nucleic acid to which an antibody or T-cell receptor specifically binds. The term “immunogenic” refers to a peptides ability to elicit at least a partial cellular immune response or antibody response. One of skill in the art readily understands the difference between an “antigenic response” and an “immunogenic response” as used herein.

[0028] As used herein, the terms “correspond(s) to” and “corresponding to,” as they relate to sequence alignment, are intended to mean enumerated positions within a reference protein, e.g., SEQ ID NO:17, and those positions in a modified protein that align with the positions on the reference protein. Thus, when the amino acid sequence of a subject protein is aligned with the amino acid sequence of a reference protein, the amino acids in the subject sequence that “correspond to” certain enumerated positions of the reference sequence are those that align with these positions of the reference sequence, but are not necessarily in these exact numerical positions of the reference sequence. Methods for aligning sequences for determining corresponding amino acids between sequences are described herein.

[0029] The amino acid residues of the antigenic proteins of the present invention may or may not be modified such as, but not limited to, addition of functional or non-functional groups such a but not limited to, acetyl groups, hydroxyl groups, carboxyl groups, carbohydrate groups (glycosylation), phosphate groups and lipid groups to name a few. Any of numerous chemical modifications may be carried out by known techniques, including but not limited to, specific chemical cleavage by cyanogen bromide, trypsin, chymotrypsin, papain, V8 protease, NaBH, acetylation, formylation, oxidation, reduction, metabolic synthesis in the presence of tunicamycin, etc.

[0030] The antigenic proteins of the present invention may or may not contain additional elements that, for example, may include but are not limited to regions to facilitate purification. For example, “histidine tags” (“his tags”) or “lysine tags” may be appended or “fused” to the antigenic proteins to create “antigenic fusion proteins.” Examples of histidine tags include, but are not limited to hexaH, heptaH and hexaHN. Examples of lysine tags include, but are not limited to pentaL, heptal and FLAG. Such regions may be removed prior to final preparation of the antigenic proteins. Other examples of a second fusion peptide include, but are not limited to, glutathione S-transferase (GST) and alkaline phosphatase (AP).

[0031] The addition of peptide moieties to antigenic proteins, whether to engender secretion or excretion, to improve stability and to facilitate purification or translocation, among others, is a familiar and routine technique in the art and may include modifying amino acids at the terminus to accommodate the tags. For example, the N-terminus amino acid may be modified to, for example, arginine and/or serine to accommodate a tag. Of course, the amino acid residues of the C-terminus may also be modified to accommodate tags. One particularly useful fusion protein comprises a heterologous region from immunoglobulin that can be used solubilize proteins.

[0032] Other types of fusion proteins provided by the present invention include but are not limited to, fusions with secretion signals and other heterologous functional regions. Thus, for instance, a region of additional amino acids, particularly charged amino acids, may be added to the N-terminus of the antigenic proteins to improve stability and persistence in the host cell, during purification or during subsequent handling and storage.

[0033] Another particular example of fusion polypeptides of the invention includes an antigenic polypeptide, fragment or variant thereof fused to a polypeptide having adjuvant activity, such as the subunit 8 of either cholera toxin or E. coli heat labile toxin. Another particular example of a fusion polypeptide encompassed by the invention includes an antigenic polypeptide fused to a cytokine, such as, but not limited to, IL-2, IL-4, IL-10, IL-12, or interferon. An antigenic polypeptide of the invention can be fused to the N- or C-terminal end of a polypeptide having adjuvant activity. Alternatively, an antigenic polypeptide of the invention can be fused within the amino acid sequence of the polypeptide having adjuvant activity.

[0034] Also, in one embodiment, the antigenic polypeptides, and fusions thereof, may comprise sequences that form one or more epitopes of a native P. falciparum and/or P. yoelii polypeptides that elicit bactericidal or opsonizing antibodies and/or CD8⁺ T cells. Such antigenic polypeptides may be identified by their ability to generate antibodies and/or CD8⁺ T cells that kill cells infected with P. falciparum and/or P. yoelii.

[0035] The present invention provides antibodies that specifically bind to one or more of the antigenic peptides of the present invention. For the production of such antibodies, isolated or purified preparations of an antigenic polypeptide of the present invention can be used as an immunogen in an immunogenic composition. The same immunogen can be used to immunize mice for the production of hybridoma lines that produce monoclonal antibodies.

[0036] In other embodiments, the antigenic polypeptides of the present invention are used as immunogens. The peptides may be produced by protease digestion, chemical cleavage of isolated or purified polypeptide, chemical synthesis or by recombinant expression, after which they are then isolated or purified. Such isolated or purified peptides can be used directly as immunogens. In particular embodiments, useful peptide fragments are 8 or more amino acids in length.

[0037] Useful immunogens may also comprise such peptides conjugated to a carrier molecule, such as a carrier protein. Carrier proteins may be any commonly used in immunology, include, but are not limited to, bovine serum albumin (BSA), chicken albumin, keyhole limpet hemocyanin (KLH), tetanus toxoid, synthetic T cell epitopes and the like.

[0038] In further embodiments, useful immunogens for eliciting antibodies of the invention comprise mixtures of two or more of any of the above-mentioned individual immunogens.

[0039] Immunization of animals with the immunogens described herein, for example in humans, rabbits, rats, ferrets, mice, sheep, goats, cows or horses, can be performed following procedures well known to those skilled in the art, for purposes of obtaining antisera containing polyclonal antibodies or hybridoma lines secreting monoclonal antibodies.

[0040] Monoclonal antibodies can be prepared by standard techniques, given the teachings contained herein. Such techniques are disclosed, for example, in U.S. Pat. Nos. 4,271,145 and 4,196,265, which are incorporated by reference. Briefly, an animal is immunized with the immunogen. Hybridomas are prepared by fusing spleen cells from the immunized animal with myeloma cells. The fusion products are screened for those producing antibodies that bind to the immunogen. The positive hybridomas clones are isolated, and the monoclonal antibodies are recovered from those clones.

[0041] Immunization regimens for production of both polyclonal and monoclonal antibodies are well known in the art. The immunogen may be injected by any of a number of routes, including subcutaneous, intravenous, intraperitoneal, intradermal, intramuscular, mucosal (e.g., nasal, vaginal, rectal), or a combination of these. The immunogen may be injected in soluble form, aggregate form, attached to a physical carrier, or mixed with an adjuvant, using methods and materials well known in the art. The antisera and antibodies may be purified using column chromatography methods well known to those of skill in the art.

[0042] The antibodies of the invention, including but not limited to those that are cytotoxic, cytostatic, or neutralizing, may be used in passive immunization to prevent or attenuate P. falciparum and/or P. yoelii infections of animals, including humans. As used herein, a cytotoxic antibody is one that enhances opsonization and/or complement killing of the protozoan bound by the antibody. As used herein, neutralizing antibody is one that reduces the infectivity of the P. falciparum and/or P. yoelii and/or blocks binding of P. falciparum, P. vivax and/or P. yoelii to a target cell. An effective concentration of polyclonal or monoclonal antibodies raised against the immunogens of the invention may be administered to a host to achieve such effects. The exact concentration of the antibodies administered will vary according to each specific antibody preparation, but may be determined using standard techniques well known to those of ordinary skill in the art. Administration of the antibodies may be accomplished using a variety of techniques, including but not limited to those described herein.

[0043] The term “antibodies” is intended to include all forms, such as but not limited to polyclonal, monoclonal, purified IgG, IgM, or IgA antibodies and fragments thereof, including but not limited to antigen binding fragments such as Fv, single chain Fv (scFv), F(ab)2, Fab, and F(ab)′ fragments, single chain antibodies as disclosed in U.S. Pat. No. 4,946,778 (incorporated by reference), as well as complementary determining regions (CDR) as disclosed in Verhoeyen and Winter, in Molecular Immunology 2ed., by B. D. Hames and D. M. Glover, IRL Press, Oxford University Press, 1996, at pp. 283-325 (incorporated by reference).

[0044] Further aspects of the invention include chimeric and/or humanized antibodies (U.S. Pat. Nos. 5,225,539; 5,585,089; and 5,530,101; all of which are incorporated by reference) in which one or more of the antigen binding regions of the antibody is introduced into the framework region of a heterologous (e.g. human) antibody. The chimeric or humanized antibodies of the invention are less antigenic in humans than non-human antibodies but have the desired antigen binding and other activities, including but not limited to neutralizing activity, cytotoxic activity, opsonizing activity or protective activity.

[0045] In one aspect of the invention, the antibodies of the invention are human antibodies. Human antibodies may be isolated, for example, from human immunoglobulin libraries (see, e.g., PCT publications WO 9846645, WO 9850433, WO 9824893, WO 9816054, WO9634096, WO 9633735, and WO 9110741, all of which are incorporated by reference) by, for example, phage display techniques (see, e.g., PCT publications WO 9002809; WO 9110737; WO 9201047; WO 9218619; WO 9311236; WO 9515982; WO 9520401 and U.S. Pat. Nos. 5,698,426; 5,223,409; 5,403,484; 5,580,717; 5,427,908; 5,750,753; 5,821,047; 5,571,698; 5,427,908; 5,516,637; 5,780,225; 5,658,727; 5,733,743 and 5,969,108; each of which is incorporated herein by reference in its entirety. Human antibodies may also be generated from animals transgenic for one or more human immunoglobulin and that do not express endogenous immunoglobulins, see, e.g., U.S. Pat. No. 5,939,598, which is incorporated by reference. Human antibodies may also be generated as described in U.S. Patent Application No. 20130291134 which is herein incorporated by reference.

[0046] The invention also provides polynucleotides that code for the isolated antigenic proteins disclosed herein. The nucleic acids of the invention can be DNA or RNA, for example, mRNA. The nucleic acid molecules can be double-stranded or single-stranded; single stranded RNA or DNA can be the coding, or sense, strand or the non-coding, or antisense, strand. In particular, the nucleic acids may encode any of the antigenic proteins disclosed herein, as well as variants thereof. Of course, the nucleic acids of the present invention may encode additional elements, such as his tags and the like. For example, the nucleic acids of the invention would include those that encode any of the antigenic proteins and variants thereof that are also contain a glutathione-S-transferase (GST) fusion protein, poly-histidine (e.g., Hiss), poly-HN, poly-lysine, etc. If desired, the nucleotide sequences can include additional non-coding sequences such as non-coding 3′ and 5′ sequences (including regulatory sequences, for example).

[0047] Nucleic acids encoding the antigenic polypeptides of the present invention may be produced by methods well known in the art. In one aspect, nucleic acids encoding the antigenic polypeptides can be derived from polypeptide coding sequences by recombinant DNA methods known in the art. For example, the coding sequence of an antigenic polypeptide may be altered by creating amino acid substitutions that will not affect the immunogenicity of the antigenic polypeptide or which may improve its immunogenicity, such as conservative or semi-conservative substitutions as described above. Various methods may be used, including but not limited to, oligonucleotide directed, site specific mutagenesis. This and other techniques known in the art may be used to create single or multiple mutations, such as replacements, insertions, deletions, and transpositions, for example, as described in Botstein (1985) Science 229:1193-1210 which is incorporated by reference.

[0048] The identified and isolated DNA encoding the antigenic polypeptides of the present invention can be inserted into an appropriate cloning vector. A large number of vector-host systems known in the art may be used. The term “host” or “host cell” as used herein refers to either in vivo in an animal or in vitro in mammalian cell cultures.

[0049] The present invention also comprises vectors containing the nucleic acids encoding the antigenic proteins of the present invention. As used herein, a “vector” may be any of a number of nucleic acids into which a desired sequence may be inserted by restriction and ligation for transport between different genetic environments or for expression in a host cell. Vectors are typically composed of DNA although RNA vectors are also available. Vectors include, but are not limited to, plasmids and phagemids. A cloning vector is one which is able to replicate in a host cell, and which is further characterized by one or more endonuclease restriction sites at which the vector may be cut in a determinable fashion and into which a desired DNA sequence may be ligated such that the new recombinant vector retains its ability to replicate in the host cell. An expression vector is one into which a desired DNA sequence may be inserted by restriction and ligation such that it is operably joined to regulatory sequences and may be expressed as an RNA transcript. Vectors may further contain one or more marker sequences suitable for use in the identification and selection of cells which have been transformed or transfected with the vector. Markers include, for example, genes encoding proteins which increase or decrease either resistance or sensitivity to antibiotics or other compounds, genes which encode enzymes whose activities are detectable by standard assays known in the art (e.g., f-galactosidase or alkaline phosphatase), and genes which visibly affect the phenotype of transformed or transfected cells, hosts, colonies or plaques. Examples of vectors include but are not limited to those capable of autonomous replication and expression of the structural gene products present in the DNA segments to which they are operably joined.

[0050] In certain respects, the vectors to be used are those for expression of polynucleotides and proteins of the present invention. Generally, such vectors comprise cis-acting control regions effective for expression in a host operatively linked to the polynucleotide to be expressed. Appropriate trans-acting factors are supplied by the host, supplied by a complementing vector or supplied by the vector itself upon introduction into the host.

[0051] A great variety of expression vectors can be used to express the proteins of the invention. Such vectors include chromosomal, episomal and virus-derived vectors, e.g., vectors derived from bacterial plasmids, from bacteriophage, from yeast episomes, from yeast chromosomal elements, from viruses such as adeno-associated virus, lentivirus, baculoviruses, papova viruses, such as SV40, vaccinia viruses, adenoviruses, fowl pox viruses, pseudorabies viruses and retroviruses, and vectors derived from combinations thereof, such as those derived from plasmid and bacteriophage genetic elements, such as cosmids and phagemids. All may be used for expression in accordance with this aspect of the present invention. Generally, any vector suitable to maintain, propagate or the fusion proteins in a host may be used for expression in this regard.

[0052] In select embodiments, the compositions comprise an expression vector the contains a nucleic acid that encodes at least one of the proteins of the invention, wherein the DNA expression vector is a DNA plasmid, aiphavirus, replicon, adenovirus, poxvirus, adenoassociated virus, cytomegalovirus, canine distemper virus, yellow fever virus, retrovirus, RNA replicons, DNA replicons, alphavirus replicon particles, Venezuelan Equine Encephalitis virus, Semliki Forest Virus or Sindbus Virus.

[0053] The DNA sequence in the expression vector is generally operably linked to appropriate expression control sequence(s) including, for instance, a promoter to direct mRNA transcription. Representatives of such promoters include, but are not limited to, the phage lambda PL promoter, the E. coli lac, trp and tac promoters, HIV promoters, the SV40 early and late promoters and promoters of retroviral LTRs, to name just a few of the well-known promoters. In general, expression constructs will contain sites for transcription, initiation and termination and, in the transcribed region, a ribosome binding site for translation. The coding portion of the mature transcripts expressed by the constructs will include a translation initiating AUG at the beginning and a termination codon (UAA, UGA or UAG) appropriately positioned at the end of the polypeptide to be translated.

[0054] In addition, the constructs may contain control regions that regulate, as well as engender expression. Generally, such regions will operate by controlling transcription, such as repressor binding sites and enhancers, among others.

[0055] Vectors for propagation and expression generally will include selectable markers. Such markers also may be suitable for amplification or the vectors may contain additional markers for this purpose. In this regard, the expression vectors may contain one or more selectable marker genes to provide a phenotypic trait for selection of transformed host cells. Preferred markers include dihydrofolate reductase or neomycin resistance for eukaryotic cell culture, and tetracycline, kanamycin or ampicillin resistance genes for culturing E. coli and other bacteria.

[0056] Promoter/enhancer elements which may be used to control expression of inserted sequences include, but are not limited to the SV40 early promoter region (Bernoist and Chambon, 1981, Nature 290:304-310), the promoter contained in the 3′ long terminal repeat of Rous sarcoma virus (Yamamoto (1980) Cell 22:787-797), the herpes thymidine kinase promoter (Wagner (1981) Proc. Natl. Acad. Sci. U.S.A. 78:1441-1445), the regulatory sequences of the metalothionein gene (Brinster (1982) Nature 296:39-42) for expression in animal cells, the promoters of lactamase (Villa-Kamaroff (1978) Proc. Natl. Acad. Sci. U.S.A. 75:3727-3731), tac (DeBoer (1983) Proc. Natl, Acad. Sci. U.S.A. 80:21-25), or trc for expression in bacterial cells (see also “Useful proteins from recombinant bacteria” in Scientific American, 1980, 242:74-94), the nopaline synthetase promoter region or the cauliflower mosaic virus 35S RNA promoter (Gardner (1981) Nucl. Acids Res. 9:2871), and the promoter of the photosynthetic enzyme ribulose biphosphate carboxylase (Herrera-Estrella (1984) Nature 310:115-120) for expression in plant cells; Gal4 promoter, the ADC (alcohol dehydrogenase) promoter, PGK (phosphoglycerol kinase) promoter, alkaline phosphatase promoter for expression in yeast or other fungi. The entire teachings of any reference referred to herein are incorporated by reference herein as if fully set forth herein.

[0057] Any method known in the art for inserting DNA fragments into a vector may be used to construct expression vectors containing an antigenic polypeptide encoding nucleic acid molecule comprising appropriate transcriptional/translational control signals and the polypeptide coding sequences. These methods may include in vitro recombinant DNA and synthetic techniques and in vivo recombination.

[0058] Commercially available vectors for expressing heterologous proteins in bacterial hosts include but are not limited to pZERO, pTrc99A, pUC19, pUC18, pKK223-3, pEX1, pCAL, pET, pSPUTK, pTrxFus, pFastBac, pThioHis, pTrcHis, pTrcHis2, and pLEx. For example, the phage in lambda GEM™-11 may be utilized in making recombinant phage vectors which can be used to transform host cells, such as E. coli LE392. In a preferred embodiment, the vector is pQE30 or pBAD/ThioE, which can be used transform host cells, such as E. coli.

[0059] The invention also provides for host cells comprising the nucleic acids and vectors described herein. A variety of host-vector systems may be utilized to express the polypeptide-coding sequence. These include but are not limited to mammalian cell systems infected with virus (e.g., vaccinia virus, adenovirus, etc.); insect cell systems infected with virus (e.g., baculovirus); microorganisms such as yeast containing yeast vectors, or bacteria transformed with bacteriophage DNA, plasmid DNA, or cosmid DNA, plant cells or transgenic plants.

[0060] Hosts that are appropriate for expression of nucleic acid molecules of the present invention, fragments, analogues or variants thereof, may include E. coli, Bacillus species, Haemophilus, fungi, yeast, such as Saccharomyces, Pichia, Bordetella, or Candida, or the baculovirus expression system.

[0061] In addition, a host cell strain may be chosen which modulates the expression of the inserted sequences, or modifies and processes the gene product in the specific fashion desired. Expression from certain promoters can be elevated in the presence of certain inducers; thus, expression of the genetically engineered antigenic polypeptides may be controlled. Furthermore, different host cells have characteristic and specific mechanisms for the translational and post-translational processing and modification of proteins. Appropriate cell lines or host systems can be chosen to ensure the desired modification and processing of the foreign protein expressed.

[0062] Once a suitable host system and growth conditions are established, recombinant expression vectors can be propagated and prepared in quantity. Upon expression, a recombinant polypeptide of the invention is produced and can be recovered in a substantially purified from the cell paste, the cell extract or from the supernatant after centrifugation of the recombinant cell culture using techniques well known in the art.

[0063] For instance, the recombinant polypeptide can be purified by antibody-based affinity purification, preparative gel electrophoresis, or affinity purification using tags (e.g., 6× histidine tag) included in the recombinant polypeptide.

[0064] The present invention also provides therapeutic and prophylactic compositions, which may be antigenic compositions or immunogenic compositions, including vaccines, for use in the treatment or prevention (reducing the likelihood) of P. falciparum, P. vivax and/or P. yoelii infections in human subjects (patients). The immunogenic compositions include vaccines for use in humans. The antigenic and immunogenic, compositions of the present invention can be prepared by techniques known to those skilled in the art and comprise, for example, an immunologically effective amount of any of the antigenic proteins or fragments thereof, disclosed herein, optionally in combination with or fused to or conjugated to one or more other immunogens, including lipids, phospholipids, carbohydrates, lipopolysaccharides, inactivated or attenuated whole organisms and other proteins, of P. falciparum and/or P. yoelii origin or other bacterial origin, a pharmaceutically acceptable carrier, optionally an appropriate adjuvant, and optionally other materials traditionally found in vaccines.

[0065] In one embodiment, the invention provides a cocktail vaccine comprising several antigens, which has the advantage that immunity against one or several strains of a single pathogen or one or several pathogens can be obtained by a single administration. Examples of other immunogens include, but are not limited to, those used in the known DPT vaccines, HMW protein of C. trachomatis or fragments thereof, MOMP of C. trachomatis or fragments thereof, or PMPH or HtrA of C. trachomatis or fragments thereof (preferably epitope containing fragments), entire organisms or subunits therefrom of Chlamydia, Neisseria, HIV, Haemophilus influenzae, Moraxella catarrhalis, Human papilloma virus, Herpes simplex virus, Haemophilus ducreyi, Treponema palladium, Candida albicans and Streptococcus pneumoniae, etc.

[0066] The term “immunogenic amount” or “immunologically effective amount” is used herein to mean an amount sufficient to induce an immune response. In one embodiment, the immunogenic composition is one that elicits an immune response sufficient to prevent or reduce the likelihood of P. falciparum and/or P. yoelii infections or to attenuate the severity of any preexisting or subsequent P. falciparum and/or P. yoelii infection. An immunogenic amount of the immunogen to be used in the vaccine is determined by means known in the art in view of the teachings herein. The exact concentration will depend upon the specific immunogen to be administered, but can be determined by using standard techniques well known to those skilled in the art for assaying the development of an immune response.

[0067] In one non-limiting embodiment of the invention, an effective amount of a composition of the invention produces an elevation of antibody titer after administration. In another, more specific embodiment of the invention, approximately 0.01 to 2000 μg, or 0.1 to 500 μg, or 50 to 250 μg of the protein administered is to a host. Compositions which induce CD8⁺ T cell responses which are bactericidal or reactive with host cells infected with P. falciparum and/or P. yoelii are also an aspect of the invention. Additional compositions comprise at least one adjuvant.

[0068] The combined immunogen and carrier or diluent may be an aqueous solution, emulsion or suspension or may be a dried preparation. Appropriate carriers are known to those skilled in the art and include stabilizers, diluents, and buffers. Suitable stabilizers include carbohydrates, such as sorbitol, lactose, mannitol, starch, sucrose, dextran, and glucose, and proteins, such as albumin or casein. Suitable diluents include saline, Hanks Balanced Salts, and Ringers solution. Suitable buffers include an alkali metal phosphate, an alkali metal carbonate, or an alkaline earth metal carbonate. In select embodiments, the composition of the invention is formulated for administration to humans.

[0069] The pharmaceutical and immunogenic compositions, including vaccines, of the invention are prepared by techniques known to those skilled in the art, given the teachings contained herein. Generally, an immunogen is mixed with the carrier to form a solution, suspension, or emulsion. One or more of the additives discussed herein may be added in the carrier or may be added subsequently. The vaccine preparations may be desiccated or lyophilized, for example, by freeze drying or spray drying for storage or formulations purposes. They may be subsequently reconstituted into liquid vaccines by the addition of an appropriate liquid carrier or administered in dry formulation using methods known to those skilled in the art, particularly in capsules or tablet forms.

[0070] Immunogenic, antigenic, pharmaceutical and vaccine compositions may further contain one or more auxiliary substance, such as wetting or emulsifying agents, pH buffering agents, or adjuvants to enhance the effectiveness thereof. Immunogenic, antigenic, pharmaceutical and vaccine compositions may be administered to fish, birds, humans or other mammals, including ruminants, rodents or primates, by a variety of administration routes, Including parenterally, intradermally, intraperitonealy, subcutaneously or intramuscularly.

[0071] Alternatively, the immunogenic, antigenic, pharmaceutical and vaccine compositions formed according to the present invention, may be formulated and delivered in a manner to evoke an immune response at mucosal surfaces. Thus, the immunogenic, antigenic, pharmaceutical and vaccine compositions may be administered to mucosal surfaces by, for example, the nasal, oral (intragastric), ocular, bronchiolar, intravaginal or intrarectal routes. Alternatively, other modes of administration including suppositories and oral formulations may be desirable. For suppositories, binders and carriers may include, for example, polyalkalene glycols or triglycerides. Oral formulations may include normally employed incipients such as, for example, pharmaceutical grades of saccharine, cellulose and magnesium carbonate. These compositions can take the form of microspheres, solutions, suspensions, tablets, pills, capsules, sustained release formulations or powders and contain about 0.001 to 95% of an antigenic protein. Some dosage forms may contain 50 μg to 250 μg of an antigenic protein. The immunogenic, antigenic, pharmaceutical and vaccine compositions are administered in a manner compatible with the dosage formulation, and in such amount as will be therapeutically effective, protective or immunogenic. The compositions may optionally comprise an adjuvant.

[0072] Further, the immunogenic, antigenic, pharmaceutical and vaccine compositions may be used in combination with or conjugated to one or more targeting molecules for delivery to specific cells of the immune system and/or mucosal surfaces. Some examples include but are not limited to vitamin 812, bacterial toxins or fragments thereof, monoclonal antibodies and other specific targeting lipids, proteins, nucleic acids or carbohydrates.

[0073] Suitable regimes for initial administration and booster doses are also variable, but may include an initial administration followed by subsequent administrations, such as a booster administration. The dose may also depend on the route(s) of administration and will vary according to the size of the host. The concentration of the protein in an antigenic, immunogenic or pharmaceutical composition according to the invention is in general about 0.001 to 95%, specifically about 0.01 to 5%.

[0074] The antigenic, immunogenic or pharmaceutical preparations, including vaccines, may comprise as the immunostimulating material a nucleic acid vector comprising at least a portion of the nucleic acid molecule encoding at least one antigenic protein.

[0075] A vaccine comprising nucleic acid molecules encoding one or more of the antigenic polypeptides or fragments thereof of the present invention or fusion proteins as described herein, such that the polypeptide is generated in situ is provided. In such vaccines, the nucleic acid molecules may be present within any of a variety of delivery systems known to those skilled in the art, including nucleic acid expression systems, bacterial and viral expression systems. Appropriate nucleic acid expression systems contain the necessary nucleotide sequences for expression in the patient such as suitable promoter and terminating signals. The nucleic acid molecules may be introduced using a viral expression system (e.g., vaccinia or other pox virus, alphavirus retrovirus or adenovirus) which may involve the use of non-pathogenic (defective) virus. Techniques for incorporating nucleic acid molecules into such expression systems are well known to those of ordinary skill in the art. The nucleic acid molecules may also be administered as “naked” plasmid vectors as described, for example, in Ulmer (1992) Science 259:1745-1749. Techniques for incorporating DNA into such vectors are well known to those of ordinary skill in the art. A vector may additionally transfer or incorporate a gene for a selectable marker (to aid in the identification or selection of transduced cells) and/or a targeting moiety, such as a gene that encodes a ligand for a receptor on a specific target cell, to render the vector target specific. Targeting may also be accomplished using an antibody, by methods know to those skilled in the art.

[0076] Nucleic acid molecules (DNA or RNA) of the invention can be administered as vaccines for therapeutic or prophylactic purpose. Typically, a DNA molecule is placed under the control of a promoter suitable for expression in a mammalian cell. The promoter can function ubiquitously or tissue-specifically. Examples of non-tissue specific promoters include but are not limited to the early cytomegalovirus (CMV) promoter (described in U.S. Pat. No. 4,168,062) and Rous Sarcoma virus promoter (described in Norton (1985) Molec. Cell Biol. 5:281). The desmin promoter (U (1989) Gene 78:243; U (1991) J. Biol. Chem. 266:6562; and U (1993) J. Biol. Chem. 268:10401) is tissue specific and drives expression in muscle cells. More generally, useful vectors are described in, e.g., WO 9421797.

[0077] A composition of the invention can contain one or several nucleic acid molecules of the invention. It can also contain at least one additional nucleic acid molecule encoding another antigen or fragment derivative, including but not limited to, DPT vaccines, HMW protein of C. trachomatis or fragment thereof, MOMP of C. trachomatis or fragment thereof, entire organisms or subunits therefrom of Chlamydia, Neisseria, HIV Haemophilus influenzae, Moraxella catarrhalis, Human papilloma virus, Herpes simplex virus, Haemophilus ducreyi, Treponema pallidium, Candida albicans and Streptococcus pneumoniae, etc. A nucleic acid molecule encoding a cytokine, such as interleukin-1 or interleukin-12 can also be added to the composition so that the immune response is enhanced. DNA molecules of the invention and/or additional DNA molecules may be on different plasmids or vectors in the same composition or can be carried in the same plasmid or vector.

[0078] Other formulations of nucleic acid molecules for therapeutic and prophylactic purposes include sterile saline or sterile buffered saline colloidal dispersion systems, such as macromolecule complexes, nanocapsules, silica microparticles, tungsten microparticles, gold microparticles, microspheres, beads and lipid based systems including oil-in-water emulsions, micelles, mixed micelles and liposomes. A preferred colloidal system for use as a delivery vehicle in vitro and in vivo is a liposome (i.e., an artificial vesicle). The uptake of naked nucleic add molecules may be increased by incorporating the nucleic acid molecules into and/or onto biodegradable beads, which are efficiently transported into the cells. The preparation and use of such systems is well known in the art.

[0079] A nucleic acid molecule can be associated with agents that assist in cellular uptake. It can be formulated with a chemical agent that modifies the cellular permeability, such as bupivacaine (see, e.g., WO9416737).

[0080] Cationic lipids are also known in the art and are commonly used for DNA delivery. Such lipids include Lipofectin™ also known as DOTMA (N-[1-(2,3-dioeyloxy)propyl]-N,N,N-trimethylammonium chloride), DOTAP (1,2-bis(oleyloxy)-3-(trimethylammonio)propane, DDAB (dimethyldioctadecylammonium bromide), DOGS (dioctadecylamidologlycy spermine) and cholesterol derivatives such as DC-Chol (3 beta-(N—(N′,N′-dimethyl aminomethane)-carbamoyl) cholesterol. A description of these cationic lipids can be found in U.S. Pat. No. 5,283,185, WO 9115501, WO 9526356, and U.S. Pat. No. 5,527,928. Cationic lipids for DNA delivery can be used in association with a neutral lipid such as DOPE (dioleyl phosphatidylethanolamine) as described in, e.g., WO 9011092.

[0081] Other transfection facilitation compounds can be added to a formulation containing cationic liposomes. They include, e.g., spermine derivatives useful for facilitating the transport of DNA through the nuclear membrane (see, for example, WO 9318759) and membrane-permeabilizing compounds such as GALA, Gramicidine 5 and cationic bile salts (see, for example, WO 9319768).

[0082] The amount of nucleic acid molecule to be used in a vaccine recipient depends, e.g., on the strength of the promoter used in the DNA construct, the immunogenicity of the expressed gene product, the mode of administration and type of formulation. In general, a therapeutically or prophylactically effective dose from about 1 μg to about 1 mg, preferably from about 10 μg to about 800 μg and more preferably from about 25 μg to about 250 μg can be administered to human adults. The administration can be achieved in a single dose or repeated at intervals.

[0083] The route of administration can be any conventional route used in the vaccine field. As general guidance, a nucleic acid molecule of the invention can be administered via a mucosal surface, e.g., an ocular, intranasal, pulmonary, oral, intestinal, rectal, vaginal, and urinary tract surface; or via a parenteral route, e.g., by an intravenous, subcutaneous, intraperitoneal, intradermal, intra-epidermal or intramuscular route. The choice of administration will depend on the formulation that is selected. For instance, a nucleic acid molecule formulated in association with bupivacaine is advantageously administered into muscles.

[0084] Recombinant bacterial vaccines genetically engineered for recombinant expression of nucleic acid molecules encoding an antigenic protein of the present invention include Shigella, Salmonella, Vibrio cholerae, and Lactobacillus. Recombinant BCG and Streptococcus expressing one or more antigenic polypeptides can also be used for prevention or treatment of P. falciparum and/or P. yoelii infections.

[0085] Non-toxicogenic Vibrio cholerae mutant strains that are useful as a live oral vaccine are described in Mekalanos (1983) Nature 306:551 and U.S. Pat. No. 4,882,278. An effective vaccine dose of a Vibrio cholerae strain capable of expressing a polypeptide or polypeptide derivative encoded by a DNA molecule of the invention can be administered.

[0086] Attenuated Salmonella typhimurium strains, genetically engineered for recombinant expression of heterologous antigens or not and their use as oral vaccines are described in Nakayama (1988) BioTechnology 6:693 and WO9211361.

[0087] Other bacterial strains useful as vaccine vectors are described in High (1992) EMBO 11:1991; Sizemore (1995) Science 270:299 (Shigella flexneri); Medaglini (1995) Proc. Natl. Acad. Sci. US92:6868 (Streptococcus gordonii); and Flynn (1994) Cell Mol. Biol. 40:31; WO 886626; WO 900594; WO 9113157; WO 921796; and WO 0221376 (Bacille Calmette Guerin).

[0088] In genetically engineered recombinant bacterial vectors, nucleic acid molecule(s) of the invention can be inserted into the bacterial genome, carried on a plasmid, or can remain in a free state.

[0089] When used as vaccine agents, recombinant bacterial or viral vaccines, nucleic acid molecules and polypeptides of the invention can be used sequentially or concomitantly as part of a multistep immunization process. For example, a mammal can be initially primed with a vaccine vector of the invention such as pox virus or adenovirus, e.g., via the parenteral route or mucosally and then boosted several time with a polypeptide e.g., via the mucosal route. In another example, a mammal can be vaccinated with polypeptide via the mucosal route and at the same time or shortly thereafter, with a nucleic acid molecule via intramuscular route.

[0090] The antigenicity and/or immunogenicity of the peptides or fragments described herein may or may not necessarily require the use of an immunologically effective amount of an adjuvant or combination of adjuvants such as, but not limited to, alum, aluminum phosphate, aluminum hydroxide, squalene, oil-based adjuvants, virosomes, OS21, MFS9, Army Liposoma Formulation (ALF) with or without QS-21 (Genito et al, Vaccine 35:3865 (2017)), interleukin 12 (IL-12), CpG, small molecule mast cell activator (MP7), TLR7 imidaroquinoline ligand 3M-019, resquimod (R848), N-acetyl-muramyl-L-threonyl-D-isoglutamine (thr-MDP), N-acetyl-nor-muramy-L-alanyl-D-isogiutamine (CGP11637, referred toasnor-MDP), N-acetylmuramy-L-alanyl-D-isoglutaminyl-L-alanine-2-(1′-2′-dip-amitoyl-sn-glycero-3 hydroxyphosphoryloxy)-ethylamine (CGP 19835A, referred to as MTP-PE), and RIBI, which contains three components extracted from bacteria, monophosphoryl lipid A, trehalose dimycolate and cell wall skeleton (MPL+TDM+CWS) in a 2% squalene/Tween 80. Table I provides information on adjuvants that may be useful. Table I shows possible adjuvants and their properties. These adjuvants may be used alone or in combination to test their ability to augment the immune response towards P. falciparum and/or P. yoelii. These adjuvants are defined by their ability to drive a Th1 or Th2 response.

TABLE 1

| Adjuvant | Properties |
|---|---|
| CT | Potent mucosal adjuvant (Th2 response) |
| CpG | TLR 9 agonist (Th1 response) |
| MplA | TLR 4 agonist (Th1 response) |
| R 848 | TLR 7/8 agonist (Th1 response) |
| IL-12 | Pro-inflammatory cytokine (Th1 response) |
| ALF | Th1 |
| CT + CpG | Th2 + Th1 response |
| CT + MplA | Th2 + Th1 response |
| CT + R 848 | Th2 + Th1 response |
| CT + IL-12 | Th2 + Th1 response |
| CpG + MplA | Th1 response |
| CpG + R 848 | Th1 response |
| CpG + Pam3CSK4 | Th1 response |

[0091] immunostimulatory agents or adjuvants have been used for many years to improve the host immune responses to, for example, vaccines. Intrinsic adjuvants, such as lipopolysaccharides, normally are the components of the killed or attenuated bacteria used as vaccines. Extrinsic adjuvants are immunomodulators which are typically non-covalently linked to antigens and are formulated to enhance the host immune responses. Thus, adjuvants have been identified that enhance the immune response to antigens delivered parenterally. Aluminum hydroxide, aluminum oxide, and aluminum phosphate (collectively commonly referred to as alum) are routinely used as adjuvants in human and veterinary vaccines.

[0092] Other extrinsic adjuvants may include chemokines, cytokines (e.g., IL-2), saponins complexed to membrane protein antigens (immune stimulating complexes), pluronic polymers with mineral oil, killed mycobacteria in mineral oil, Freund's complete adjuvant, bacterial products, such as muramyl dipeptide (MDP) and lipopolysaccharide (LPS), as well as lipid A, and liposomes.

[0093] U.S. Pat. No. 6,019,982, incorporated herein by reference, describes mutated forms of heat labile toxin of enterotoxigenic E. coli (“mLT”). U.S. Pat. No. 5,057,540, incorporated herein by reference, describes the adjuvant, QS21, an HPLC purified non-toxic fraction of a saponin from the bark of the South American tree Quiliaja saponaria molina. 3D-MPL is described in Great Britain Patent 2,220,211, which is incorporated herein by reference.

[0094] U.S. Pat. No. 4,855,283, which is incorporated herein by reference, teaches glycolipid analogues including N-glycosylamides, N-glycosylureas and N-glycosylcarbamates, each of which is substituted in the sugar residue by an amino acid, as immuno-modulators or adjuvants. Lockhoff reported that N-glycosphospholipids and glycoglycerolipids are capable of eliciting strong immune responses in both herpes simplex virus vaccine and pseudorables virus vaccine. Some glycolipids have been synthesized from long chain-alkylamines and fatty acids that are linked directly with the sugars through the anomeric carbon atom, to mimic the functions of the naturally occurring lipid residues.

[0095] U.S. Pat. No. 4,258,029 granted to Moloney, incorporated herein by reference, teaches that octadecyl tyrosine hydrochloride (OTH) functions as an adjuvant when complexed with tetanus toxoid and formalin inactivated type I, II and III poliomyelitis virus vaccine. Lipidation of synthetic peptides has also been used to increase their immunogenicity.

[0096] Therefore, according to the invention, the immunogenic, antigenic, pharmaceutical, including vaccine, compositions may further comprise immune-effective amounts of an adjuvant, such as, but not limited to alum, mLT, LTR192G, QS21, RIBI DETOX™, MMPL, CpG DNA, MF59, calcium phosphate, PLG interleukin 12 (IL12), TLR7 imidazoquinoline ligand 3M-019, resquimod (R848), small molecule mast cell activator MP7, ALF (with or without QS-21), and all those listed above. The adjuvant may be selected from one or more of the following: alum, QS21, CpG DNA, PLG, IT, 3D-mPL, or Bacille Calmette-Guerine (BCG) and mutated or modified forms of the above, particularly mLT and LTR192G. The compositions of the present invention may also further comprise a suitable pharmaceutical carrier, including but not limited to saline, bicarbonate, dextrose or other aqueous solution. Other suitable pharmaceutical carriers are described in Remington's Pharmaceutical Sciences, Mack Publishing Company, a standard reference text in this field, which is incorporated herein by reference in its entirety.

[0097] Immunogenic, antigenic and pharmaceutical, including vaccine, compositions may be administered in a suitable, nontoxic pharmaceutical carrier, may be comprised in microcapsules, microbeads, and/or may be comprised in a sustained release implant.

[0098] Table 2 provides a list of antigenic proteins useful in the methods and compositions of the present invention. With respect to Table 1, the “FC” indicates flow cytometry, “ES” indicates ElisaSpot screening, P. yoelii indicates Plasmodium yoelii, P. falciparum indicates Plasmodium falciparum (isolate 3D7), and P. vivax indicates Plasmodium vivax (Sal-1).

TABLE 2
LIST OF ANTIGENIC PROTEINS

| UniProt | | | SEQ ID | | |
|---|---|---|---|---|---|
| Accession No. | Antigen Name | Source | NO. | Length | Screen |
| Q7RNQ7 | PY01758 | P. yoelii | 1 | 274 | FC |
| Q7RS41 | PY00525 | P. yoelii | 2 | 227 | FC, ES |
| Q7RK90 | PY03011 | P. yoelii | 3 | 241 | ES |
| Q7RIF0 | PY03674 | P. yoelii | 4 | 1368 | FC, ES |
| Q7RHD9 | PY04050 | P. yoelii | 5 | 1154 | FC |
| Q7RJH1 | PY03289 | P. yoelii | 6 | 297 | FC |
| Q7RML7 | PY02161 | P. yoelii | 7 | 463 | FC |
| Q7RL60 | PY02686 | P. yoelii | 8 | 218 | FC |
| Q7RJ67 | PY03396 | P. yoelii | 9 | 966 | ES |
| Q7RFZ3 | PY04558 | P. yoelii | 10 | 1121 | ES |
| Q7R985 | PY06979 | P. yoelii | 11 | 563 | ES |
| Q7RJX9 | PY03126 | P. yoelii | 12 | 347 | ES |
| Q7RKV7 | PY02793 | P. yoelii | 13 | 1488 | FC |
| Q8IJ98 | PF3D7_1030700 | P. falciparum | 14 | 257 | FC, ES |
| C0H4L2 | MAL7P1.203 | P. falciparum | 15 | 1526 | FC |
| Q8ILV3 | PF3D7_1414200 | P. falciparum | 16 | 407 | FC, ES |
| Q8IBK0 | PF3D7_0725100 | P. falciparum | 17 | 1576 | FC, ES |
| Q7RSJ8 | PY00357 | P. yoelii | 18 | 1095 | |
| Q7RQ59 | PY01244 | P. yoelii | 19 | 283 | |
| Q7RM58 | PY02329 | P. yoeiii | 20 | 499 | |
| Q7PDQ7 | PY03587 | P. yoelii | 21 | 1140 | |
| Q7RHD8 | PY04051 | P. yoelii | 22 | 967 | |
| Q7RF93 | PY04814 | P. yoelii | 23 | 335 | |
| Q7REI1 | PY05083 | P. yoelii | 24 | 603 | |
| Q7RC14 | PY05971 | P. yoelii | 25 | 548 | |
| Q7RBU9 | PY06037 | P. yoelii | 26 | 135 | |
| Q7RAM5 | PY06474 | P. yoelii | 27 | 78 | |
| Q7RAM2 | PY06477 | P. yoelii | 28 | 58 | |
| Q7RAG1 | PY06539 | P. yoelii | 29 | 2236 | |
| Q7RAE1 | PY06559 | P. yoelii | 30 | 1401 | |
| Q7R8T3 | PY07137 | P. yoelii | 31 | 1060 | |
| Q7R862 | PY07361 | P. yoelii | 32 | 319 | |
| Q7R7U4 | PY07484 | P. yoelii | 33 | 48 | |
| Q7RMF3 | PY02228 | P. yoelii | 34 | 387 | |
| Q7RKB2 | PY02989 | P. yoelii | 35 | 670 | |
| Q7REN6 | PY05028 | P. yoelii | 36 | 741 | |
| Q7RCT4 | PY05693 | P. yoelii | 37 | 304 | |
| Q7R7H8 | PY07608 | P. yoelii | 38 | 145 | |
| Q7RLY3 | PY02405 | P. yoelii | 39 | 138 | ES |
| O97302 | PF3D7_0323400 | P. falciparum | 40 | 1086 | |
| Q8I294 | PF3D7_0104500 | P. falciparum | 41 | 277 | |
| P61074 | PCNA PF13_0328 | P. falciparum | 42 | 274 | |
| Q8II84 | PF3D7_1127900 | P. falciparum | 43 | 409 | |
| C6KT88 | PF3D7_0625200 | P. falciparum | 44 | 385 | |
| Q7K6A7 | PF3D7_0518400 | P. falciparum | 45 | 229 | |
| A0A143ZXJ2 | PF3D7_0706100 | P. falciparum | 46 | 1529 | |
| Q9U0L0 | PF3D7_0407600 | P. falciparum | 47 | 1212 | |
| Q8IBA2 | PF3D7_0827000 | P. falciparum | 48 | 1289 | |
| Q8I0W7 | PF3D7_0518500 | P. falciparum | 49 | 1123 | |
| Q8IDT1 | PF3D7_1340500 | P. falciparum | 50 | 1202 | |
| Q8I4X7 | PF307_1245400 | P. falciparum | 51 | 341 | |
| Q8IK99 | PF3D7_1473900 | P. falciparum | 52 | 852 | |
| O96252 | PF3D7_0217100 | P. falciparum | 53 | 551 | |
| Q9U0M0 | PF3D7_0406600 | P. falciparum | 54 | 139 | |
| Q8IIB0 | PF3D7_1125300 | P. falciparum | 55 | 1,531 | |
| Q8ILJ3 | PF3D7_1427100 | P. falciparum | 56 | 1,320 | |
| Q8ID57 | PF3D7_1365000 | P. falciparum | 57 | 348 | |
| C0H541 | PF3D7_0916800 | P. falciparum | 58 | 49 | |
| Q8IAU4 | PF3D7_0810900.1 | P. falciparum | 59 | 345 | |
| O96209 | PF3D7_0212800 | P. falciparum | 60 | 1,224 | |
| Q8IEU1 | PF3D7_1302200 | P. falciparum | 61 | 229 | |
| Q8IB79 | PF3D7_0824500 | P. falciparum | 62 | 373 | |
| O97238 | PF3D7_0305300 | P. falciparum | 63 | 956 | |
| C0H494 | PF3D7_0407100 | P. falciparum | 64 | 333 | |
| Q8IDJ0 | PF3D7_1350900 | P. falciparum | 65 | 521 | |
| A5K7J3 | PVX_095055 | P. vivax | 66 | 1075 | |
| A5KDZ0 | PVX_111190 | P. vivax | 67 | 214 | |
| A5K9W6 | PVX_081530 | P. vivax | 68 | 282 | |
| A5K2M4 | PVX_115055 | P. vivax | 69 | 274 | |
| A5K4T9 | PVX_092005 | P. vivax | 70 | 426 | |
| A5K284 | PVX_114365 | P. vivax | 71 | 406 | |
| A5K9H4 | PVX_080325 | P. vivax | 72 | 237 | |
| A5KA67 | PVX_087845 | P. vivax | 73 | 1522 | |
| A5K187 | PVX_085740 | P. vivax | 74 | 349 | |
| A5KAM0 | PVX_000865 | P. vivax | 75 | 1157 | |
| A5K512 | PVX_089015 | P. vivax | 76 | 1181 | |
| A5KC29 | PVX_096085 | P. vivax | 77 | 1396 | |
| Q8I3S4 | PF3D7_0518600 | P. falciparum | 78 | 1276 | |
| A5K9H2 | PVX_080315 | P. vivax | 79 | 1240 | |
| A5K9H3 | PVX_080320 | P. vivax | 80 | 1006 | |
| A0A1K9YEP8 | PVX_082937 | P. vivax | 81 | 365 | |
| A5K8V6 | PVX_101165 | P. vivax | 82 | 336 | |
| A5K321 | PVX_116790 | P. vivax | 83 | 589 | |
| A5KBV3 | PVX_002685 | P. vivax | 84 | 564 | |
| A5KAN0 | PVX_000915 | P. vivax | 85 | 144 | |
| C6KSZ7 | PF3D7_0615600 | P. falciparum | 86 | 2528 | |
| A5K1Z4 | PVX_113915 | P. vivax | 87 | 2345 | |
| A5K4R4 | PVX_091885 | P. vivax | 88 | 1335 | |
| A5K0X8 | PVX_085180 | P. vivax | 89 | 1960 | |
| A5K2Q5 | PVX_115210 | P. vivax | 90 | 322 | |
| A0A1G4GV62 | PVX_099263 | P. vivax | 91 | 48 | |
| A5JZS0 | PVX_123225 | P. vivax | 92 | 351 | |
| A5KBZ4 | PVX_002890 | P. vivax | 93 | 865 | |
| A5K5K5 | PVX_089135 | P. vivax | 94 | 373 | |
| A5KB70 | PVX_119390 | P. vivax | 95 | 837 | |
| A5KAM5 | PVX_000890 | P. vivax | 96 | 321 | |
| A5K8E6 | PVX_083440 | P. vivax | 97 | 660 | |
| Q7RTC4 | PY00070 | P. yoelii | 98 | 438 | |
| O96158 | PF3D7_0206500 | P. falciparum | 99 | 1436 | |
| A5KBL3 | PVX_003755 | P. vivax | 100 | 1085 | |
| Q7RLV7 | PY02432 | P. yoelii | 101 | 149 | |
| C6S3F9 | PF3D7_1137800 | P. falciparum | 102 | 151 | |
| A5K538 | PVX_092505 | P. vivax | 103 | 154 | |
| Q7RNK9 | PY01807 | P. yoelii | 104 | 227 | |
| Q8I5L3 | PF3D7_1219900 | P. falciparum | 105 | 227 | |
| A5K001 | PVX_123635 | P. vivax | 106 | 227 | |

[0099] The examples disclosed herein are provided for illustrative purposes only and are not intended to limit the scope of the invention in any manner.

### EXAMPLES

### Example 1: Methods

[0100] For radiation-attenuated sporozoites (RAS) immunizations, 60 female BALB/c mice were immunized, via tail vein injection, with three doses of RAS (10,000, 5,000, and 5,000) at three week intervals. For generation of RAS, P. yoelii sporozoites were attenuated at 10,000 rads.

[0101] For SPZ+CQ immunizations, female BALB/c mice (n=6/group) were immunized with two administrations (one month apart) of live P. yoelii sporozoites. Various doses of sporozoites were tested (group 1=20,000, group 2=2,000, group 3=200, group 4=0). Immunized mice received a 0.1 ml intraperitoneal injection of a solution of chloroquine hydrochloride (Sigma-Aldrich) 8 mg/ml diluted in PBS, to kill newly emerging blood stage parasites, starting on the same day as sporozoite immunizations and continuing for ten consecutive days following each immunization.

[0102] For DNA-Ad5 immunizations, BALB/c mice were immunized with 100 μg of DNA vector, pcDNA3.2-Dest (Invitrogen) in a 0.1 ml volume by intramuscular immunization. Six weeks later these mice were boosted with 1×10¹⁰ pfu of Ad vector in a 0.1 ml volume. Both DNA and Ad were injected bilaterally into the tibialis anterior muscles with a 0.3 ml syringe and a 29.5 G needle (Becton Dickinson).

[0103] A20.2 J cells (ATCC) were grown in 15 ml of fresh RPMI-1640 media plus 20% FBS and 1% L-glutamine in 25 ml T-flasks. The T-flasks were kept upright and incubated in a 5% CO₂ incubator at 37° C. overnight. When the cells reached a density of 1.2-1.8×10⁶ cells/ml they were used to seed 12 well plates at a density of 5.0×10⁵ cells/well. The following day the cells were infected with AdGFP, an adenovirus vector that expresses GFP, for 2 hours in a volume of 200 μl. After infection, cells were washed with PBS, overlaid with 1 ml of fresh media and incubated at 37° C. and 5% C02 for 48 hours. The percentage of the GFP positive cells was analyzed by FACS

[0104] For the array screening, A20.2J cells were infected with 200 μl CPE lysate from each of the Ad-array vectors in 24 well plates for 2 hours. After infection, cells were washed with PBS, overlaid with 0.6 ml of fresh media and incubated at 37° C. and 5% CO₂ for 24 hours.

[0105] To screen for antigenicity, splenocytes harvested from vaccinated animals were stimulated by co-culture with infected/irradiated A20J2 cells in 96 well plates. Briefly, spleens were gently crushed using the flat end of a 3 cc or 10 cc syringe plunger, cell suspension was passed through a 70 μm filter. The splenocytes were washed twice with 0.5% FBS/10 mM HEPES/1×HBSS. To remove the red blood cells (RBC), 5 ml of RBC lysing buffer (Sigma) were added to the cell pellets, and the tubes were swirled gently to mix the cells with the buffer, then incubated for 3 minutes at room temperature. After 3 minutes, a 1:15 dilution of the samples with 0.5% FBS/10 mM HEPES/HBSS buffer was immediately performed. The cells were washed with RPMI once more, counted and diluted to 5×10⁶ cells/ml in RPMI medium.

[0106] At 24 hours after infection, A20 cells were irradiated in a Pantak X-Rad 320 irradiator at 16,666 rads. After irradiation, 1.5×10⁵ infected cells were transferred to each well of U-bottom 96-well plates preloaded with 1×10⁶ splenocytes from vaccinated or naïve mice, in triplicate, and incubated for 8 hours at 37° C. BD Golgi Plug™ (BD Bioscience) was added 1 hour into the incubation to block cytokine release. Cells were centrifuged at 1200 rpm for 5 minutes, the supernatant flicked, and the cell pellets resuspended by gentle vortexing. Live and dead cells were first stained with Live/Dead Fixable Aqua stain kit (BD Biosciences), then the cells were blocked with FC Block™ (BD Biosciences). After blocking, cell surface markers were stained with the following antibodies-(fluorochromes):CD4-eFlur-450 and CD8a-PerCP-Cy5.5 (BD Biosciences). Following separate fixation and permeabilization steps, the samples were stained intracellularly with the following antibodies-(flurochromes): IFNγ, -PE, TNF-α, APC, and IL-2—Alexa 488 (BD Biosciences). The frequency of CD4, CD8+ T cells, as well as peptide-specific IFNα and IL-2 intracellular cytokines positive T cells, was determined in an 8-color upgraded FACSCalibur™ (Becton Dickinson immunocytometry Systems) with 96 well Automated Micro-sampling System (AMS) (Cytek). Data were analyzed using Flowjow software (Trestar).

[0107] To evaluate cellular responses of mice immunized with irradiated sporozoites to novel antigens, cDNA from P. yoelii sporozoites was cloned into an adapted VR1020 plasmid (Vical) containing Gateway recombination sites (Invitrogen). VR1020 constructs encoding P. yoelii genes were transfected into the A20 cell line using AMAXA Nucleofection (Lonza) according to the manufacturer's instructions. Two million A20 cells were transfected with 5 μg of DNA, using either VR1020 encoding novel P. yoelii antigens, PyCSP, or VR1020-null. Transfection efficiency for each assay was monitored by transfection of the GFP-expressing control plasmid. Twenty-four hours post-transfection, cells were harvested and irradiated at 16,666 Rads, prior to plating for the IFN-γ ELISpot assay. Multiscreen HTS HA 96-well filter plates (Millipore) were coated with 1 μg in 100 μL of anti-mouse IFN-γ antibody done R4-6A2 in 1×PBS pH 7.4. Plates were incubated overnight at room temperature, and then washed with RPMI. Plates were then blocked with complete medium [RPMI-1640 with 25 mM HEPES and L-glutamine, supplemented with 10% heat-inactivated Fetal Calf Serum, 2 mM L-glutamine, and Penicillin-Streptomycin (Invitrogen)] for a minimum of 3 hours. Each well was plated with 400,000 splenocytes (immunized or naïve) and 100,000 transfected A20 cells. Plates were incubated for 36 hours prior to development. Cells were then discarded, and plates were washed six times with 1×PBS containing 0.05% Tween-20 using a Dynex plate washer. Each well was incubated for 3-5 hours at room temperature or overnight at 4° C. with 100 μL 2 g/mL biotinylated anti-mouse IFN-γ clone XMG1.2 (Pharmingen). Plates were then washed three times with PBS containing 0.05% Tween-20 using a Dynex plate washer. Wells were incubated with 100 μl Streptavidin-HRP (KPL) at room temperature for one hour according to the manufacturer's instructions, then washed three times with PBS-Tween as above, and then three times with PBS pH 7.4 alone. Plates were developed with 3,3′-diaminobenzidine (DAB) substrate (KPL) according to the manufacturer's instructions, and the reaction was stopped by flooding the plate with water. After drying, spots were counted using an AID ELISpot reader.

[0108] Replication-incompetent adenovirus vectors contain a deletion in one or more replication-essential genes resulting in an adenovirus vector that cannot replicate in typical host cells, including a human patient. A replication-incompetent adenovirus vector, however, can be grown in a cell line that expresses the adenovirus genes necessary for replication. For example, replication-incompetent HuAd5 vectors that contain a deletion in the HuAd5 E1 region can be grown in the 293 cell line that expresses the HuAd5 E1 region, and replication-incompetent HuAd5 vectors that contain a deletion in the HuAd5 E1, E3 and E4 regions can be grown in the 293ORF6 cell line that expresses the HuAd5 E1 and E4ORF6 regions. Two different types of replication-incompetent HuAd5 vectors were used in the methods described herein: vectors that contain deletions in the E1, E3 and E4 regions and vectors that contain a deletion in the E1 region. Replication-incompetent HuAd5 E1-, partial E3-, E4-vectors were constructed using a method in which a foreign gene was recombined into a plasmid containing the HuAd5 genome in E. coli cells. Briefly, a Plasmodium gene was cloned into a small shuttle vector downstream from a human cytomegalovirus (HCMV) immediate-early (IE) promoter and between HuAd5 flanking arms. The Plasmodium expression cassette was then recombined into a large plasmid containing the HuAd5 genome by transforming the small shuttle plasmid containing the Plasmodium expression cassette between HuAd5 flanking arms and a large plasmid containing the entire HuAd5 genome (minus HuAd5 E1, E3 and E4 regions) into a recombination-positive strain of E. coli, BJDE3. A recombinant plasmid in which the Plasmodium expression cassette has been recombined into the large HuAd5 plasmid was then identified by restriction enzyme analysis.

[0109] The large recombinant plasmid containing the Plasmodium expression cassette was then transformed into a recombination-negative strain of E. coli and isolated by standard microbiological methods. The HuAd5 sequence (containing the Plasmodium expression cassette) was liberated from the large plasmid by digestion with a restriction endonuclease. This DNA was then transfected into 293ORF6 cells. Cell lysates were serially passaged every 3-4 days until cytopathic effect (CPE) was observed. CPE is an indication that the viral vector is growing in the complementing cell line. Virus was then expanded from a single 60 mm dish to at least 10 T175 flasks. Following the final infection, the recombinant vectors were released from infected cells by 3 freeze-thaws, treated with benzonase, purified by banding on a CsCl gradient, dialyzed with a HuAd5 buffer and stored at −80° C. Particle unit (pu) titers were then determined by absorbance at 260 nm.

[0110] Replication-incompetent HuAd5 E1-vectors were generated using a site-specific recombination-based cloning method which allows for the transfer of DNA segments between different cloning vectors in vitro without the need for restriction endonucleases and ligase. The Gateway™ cloning system relies on a site-specific recombination process between bacteriophage A and E. coli. Briefly, a Plasmodium gene was cloned into a kanamycin resistant (Kmr) Gateway™ “Entry” vector between two recombination sites (attL1 and attL2). The Plasmodium gene was then recombined into a large ampicillin resistant (Apr) Gateway™ “Destination” vector that contains the entire HuAd5 genome (minus the E1 region). This “Destination” vector also contains two recombination sites (attR1 and attR2) that flank a gene for negative selection, ccdB. When the “Entry” and “Destination” vectors are combined, recombination occurs between attL1 and attR1 and between attL2 and attR2. The product of this recombination event is a large plasmid in which the Plasmodium gene was cloned into the HuAd5 genome downstream from a HCMV IE promoter. The large plasmid containing the Plasmodium expression cassette was then digested with a restriction endonuclease to liberate the HuAd5 sequence, and the DNA was transfected into 293 cells.

[0111] Cell lysates were serially passaged every 3 or 4 days until CPE is observed. Virus was expanded from a single 60 mm dish to at least 10 T175 flasks. Following the final infection, the recombinant vectors were released from infected cells by 3 freeze-thaws, treated with benzonase, purified by banding on a CsCl gradient, dialyzed with a HuAd5 buffer and stored at −80° C. Particle unit (pu) titers are then determined by absorbance at 260 nm.

[0112] Mice were immunized with a 100 μg of DNA vector expressing the specific antigen and then boosted 6 weeks later with an Ad5 vector (1×10¹ pfu) expressing the same antigen. Two weeks after the Ad5 boost, mice were challenged intravenously in the tail vein with 200 P. yoelii sporozoites using a 1 ml syringe and 26.5 G needle (Becton Dickinson).

[0113] Sporozoites were hand dissected from infected mosquito salivary glands and diluted for challenge in M199 medium containing 5% normal mouse serum (Gemini Bio-Products). The development of parasitemia was monitored over the next 2 weeks by microscopic examination of geimsa stained blood smears. Mice were considered protected if no parasites were observed in any sample at day 6, day 9 or day 14 post challenge.

### Example 2: Generation of an Array of Adenovectors that Express a Panel of Highly Expressed P. yoelii Pre-Erythrocytic Antigens

[0114] P. yoelii pre-erythrocytic genes with identifiable P. falciparum orthologs were selected for generation of an adenovector array (Ad-array) based on their level of expression in microarray and protein mass spectrometry datasets. Gene selection was made without regard to protein function or subcellular localization. In total, 312 P. yoelii genes were amplified from genomic DNA and cloned into E1/E3-deleted adenovirus type 5 (Ad5) vector genomes (FIG. 2A).

[0115] To facilitate high-throughput production of the Ad-array, the efficiency of adenovector generation was compared in multi-well plates of different sizes. The adenovector plasmid had to convert into an adenovirus vector in sufficient quantities and quality to function in the antigen screening assay. Initially, conversions were tested of two pAdFlex plasmids that expressed the P. yoelii Hep17 antigen (AdgHep17) and the cytomegalovirus p65 antigen (AdgCMVp65). These large plasmids were transfected into 293 cells in 60-mm, 6-well, 12-well, 24-well, 48-well, and 96-well plates, and the cells were passaged to increase the adenovector titer. Efficient adenovector conversion was observed in all of the wells as indicated by full cytopathic effect (CPE) at passage 2. Vector identity was verified by PCR using oligonucleotides that spanned the expression cassette (FIG. 28). Vector titers from each of the CPE wells (Table 3) demonstrated equivalent yields per infected cell. These results indicated that multiple adenovectors can be generated from pAdFlex adenovector plasmids in a parallel process in multi-well plates and that 96-well plates were suitable for the generation of the Ad-array.

TABLE 3
VECTOR YIELDS ON VARIOUS SIZE PLATES

| | |
|---|---|
| Adg.PyHEP17 | Adg.CMVp65 |

| | | | | |
|---|---|---|---|---|
| Plate Size | ffu/ml | ffu total | ffu/ml | ffu total |

| | | | | | |
|---|---|---|---|---|---|
| 60 | mm | 3.10E+08 | 3.10E+08 | 8.20E+08 | 3.44E+09 |
| 6 | well | 4.55E+08 | 9.55E+08 | 6.70E+08 | 1.41E+09 |
| 12 | well | 9.00E+08 | 7.56E+08 | 1.10E+09 | 9.246+08 |
| 24 | well | 1.33E+09 | 5.59E+08 | 1.02E+09 | 4.28E+08 |
| 48 | well | 1.38E+09 | 5.80E+07 | 1.27E+09 | 5.30E+07 |
| 96 | well | 1.26E+09 | 2.26E+07 | 1.19E+09 | 2.10E+07 |

[0116] The overall design of an antigen screening system is shown in FIG. 3A. To test the elements of the screen, the MOI necessary to efficiently infect A20 cells was determined. Cells were infected with various doses of AdGFP, an Ad5 vector expressing GFP, and the percentage of infected cells was measured 48 hr post-infection (FIG. 38). MOI of 10, 100, or 1,000 focal forming units (ffus)/cell were required to infect approximately 2%, 10%, or 50% of the cells, respectively. To determine if adenovirus vectors could efficiently present antigen following infection of antigen presenting cells (APCs), we immunized BALB/c mice with a PyCSP-expressing plasmid, stimulated splenocytes from these mice with APCs infected with an Ad5 vector expressing PyCSP (AdPyCSP), and measured activated T cells by the enzyme linked immunosorbent spot (ELISpot) assay. Strong recall responses to the AdPyCSP-infected cells were observed, even at a low MOI, comparable to those generated by pulsing APCs with a peptide containing the PyCSP immunodominant epitope (FIG. 3C). Very low responses were seen in the negative controls. These results demonstrate that A20 cells (which express both major histocompatibility complex [MHC] class I and class II alleles) infected with AdPyCSP are able to present antigen to immune T cells. This process was highly efficient, as strong T cell responses were observed even at an MOI of 10, a multiplicity that resulted in transduction of approximately 2% of the target cells. Increasing the MOI resulted in substantially increased A20 cell transduction (FIG. 3B) but only marginally increased functional activity in the ELISpot assay (FIG. 3C). Thus, low-level target cell transduction is sufficient for optimal activity to detect T cell responses in the ELISpot assay.

[0117] To determine whether lower-frequency T cell responses from mice immunized with sporozoite vaccines could be identified using our approach, we assayed CD8+ T cell responses specific for PyCSP from mice immunized with protective regimens of RAS and SPZ+CQ. PyCSP was selected as the test antigen because it is the most well-characterized target of T cell responses from mice immunized with these regimens. First, splenocytes were assayed from mice immunized with a highly protective three-dose regimen of RAS for the presence of PyCSP-specific T cells. PyCSP-specific T cells were able to be recalled in splenocytes from these mice using AdPyCSP-infected A20 cells in both ELISpot (FIG. 4A) and intracellular cytokine staining (ICS) assays (FIG. 4B). Low background responses were observed in the negative controls.

[0118] It was important to assess the degree of purity of the adenovector preparation necessary for the screen because if unpurified adenovectors were suitable, this would greatly simplify generation of the Ad-array. Accordingly, highly purified AdPyCSP (purified over three successive CsCl gradients) were compared with cell lysates containing unpurified recombinant adenovector. PyCSP-specific CD8+ T cell responses were detected with both purified and unpurified vectors using EliSpot (FIG. 4A) and ICS (FIG. 4B) assays. The results indicated that vector purification is not required to identify antigens that recall CD8+ T cell responses in mice immunized with RAS.

[0119] Ad-array vectors contain 25 bp-long att8 sequences flanking the transgene (FIG. 28), which are remnants of the recombinase cloning reaction. Ad-array vectors were directly compared with vaccine adenovectors, which do not carry the flanking attB sequences. The results indicate that the attB sequences did not inhibit the capacity to recall T cell responses in mice (FIG. 4C), indicating that Ad-array vectors are suitable for screening.

[0120] Mice immunized with a two-dose regimen of 200, 2,000, and 20,000 SPZ+CQ were completely protected from P. yoelii sporozoite challenge (FIG. 4D). FIG. 4E shows that PyCSP-specific T cells were induced by immunizing mice with a highly protective 2,000 SPZ+CQ regimen. Splenocytes from immunized mice had a high background of activated CD8+ T cells. When incubated with A20 cells infected with the negative control vectors AdNull and AdGFP, 0.8%-0.9% of the CD8+ T cells were activated. A20 cells infected with AdPyCSP recalled PyCSP-specific T cell responses that were more frequent than the negative controls. Statistically significant results were observed with MOIs of 10 and 100 ffu/cell. These data suggested that it would be possible to utilize our Ad-array technology to identify new antigen targets of protective T cell responses following immunization of mice with SPZ+CQ.

### Example 3: Identification of the Antigen Targets of CD8+ T Cells Induced Following Vaccination with Protective Regimens of SPZ+CQ

[0121] The 2,000 SPZ+CQ regimen was used to generate protective T cells for the identification of antigens. Splenocytes were harvested 2 weeks after the last sporozoite immunization. The full array was screened simultaneously, in triplicate, against these freshly isolated splenocytes by ICS to identify pre-erythrocytic stage antigens able to recall IFNγ-expressing CD8+ T cells. A20 cells infected with 100 ffu/cell AdgPyCSP were included as a positive control. Negative controls included uninfected A20 cells and A20 cells infected with 100 ffu/cell of AdNull and AdGFP vectors. The mean of the negative controls was 1% IFNγ-expressing CD8+ T cells (FIG. 5). Antigens with responses greater than 2 SD of the mean of the negative controls (>1.2% CD8+ IFNγ+ cells) were defined as positive hits in the screen. By this definition, 69 of the antigens in the array were positive and were targeted by CD8+ T cells induced in mice immunized with SPZ+CQ (FIG. 5). Thirteen of these antigens recalled higher-frequency CD8+ T cell responses than PyCSP. CD4+ T cell responses and tumor necrosis factor (TNF)-α and interleukin (IL)-2 cytokines were analyzed by ICS. CD4+ T cell responses were not observed in this system. CD8+ TNF-α-expressing T cells were observed and tended to mirror the CD8+ IFNα responses. Very low levels of IL-2-expressing cells were observed.

### Example 4: Identification of Protective Antigens

[0122] Since the SP2+CQ regimen induces protective T cell responses directed against antigens expressed in the pre-erythrocytic stages of the parasite life cycle, it was hypothesized that a subset of antigens identified in the SP2+CQ screen would induce protective immune responses when delivered using a potent vaccine regimen designed to optimize CD8+ T cell responses. The protective capacity of antigens was tested using a DNA prime-Ad5 boost regimen in BALB/c mice. Mice were immunized with 100 μg of DNA vector expressing the specific antigen and then boosted 6 weeks later with 1×10¹⁰ particle units (PUs) of an Ad5 vector expressing the same antigen. Two weeks after the Ad5 boost, mice were challenged with P. yoelii sporozoites and protection was monitored by microscopic examination of Giemsa-stained blood smears. Twenty-one percent (21%) of the PY00525 immunized mice were completely protected from sporozoite challenge, indicating that PY00525 can provide protection in mice. Twenty-one percent (21%) of the PY02793 immunized mice were completely protected from sporozoite challenge, indicating that PY02793 can provide protection in mice. Twenty-one percent (21%) of the PY03289 immunized mice were completely protected from sporozoite challenge, indicating that PY03289 can provide protection in mice. Thirty-six percent (36%) of the PY03674 immunized mice were completely protected from sporozoite challenge, indicating that PY03674 can provide protection in mice. The positive controls, which were immunized with PyCSP expressing DNA and Ad5 vectors in the same regimen, protected 100% of the mice. The negative controls, immunized with DNA and Ad5 Null vectors that did not express any transgene did not protect any mice. These data indicate that the antigen discovery system is capable of identifying protective antigens.

### Example 5: The P. falciparum Ortholog of PY03674 is Immunogenic in BALB/c Mice

[0123] To begin evaluation of a selected pre-erythrocytic antigen as a vaccine candidate, the P. falciparum ortholog of PY03674 was cloned into a highly immunogenic and low seroprevalent gorilla adenovector (GC46) and tested immunogenicity in mice. PF3D7_0725100 (SEQ ID NO.: 17) was codon optimized for expression in mammals, synthesized, and used to produce GC46.PF3D7_0725100. BALB/c mice (n=6/group) were immunized with a single intramuscular (IM) administration of GC46. PF3D7_0725100 (1×10 PFU). GC46.Null immunized and naive mice were included as control groups. At 21 days post-immunization, mice were euthanized for T cell studies. Antigen-specific T cell responses were measured from splenocytes by flow cytometry after stimulation with overlapping peptide pools and staining for cytokines and cell surface markers. GC46. PF3D7_0725100 was immunogenic, inducing both antigen-specific CD8+ and CD4+ T cell responses (FIG. 6).

[0124] In particular, BALB/c mice were immunized with a single dose of 1×10⁹ PFU of GC46.PF3D7_0725100 by the intramuscular route with a 1 ml syringe and a 30G needle (Becton Dickinson Co., Franklin Lakes, N.J.). At 21 days post immunization, mice were euthanized for splenocyte harvest and assessment of immune responses by ICS and flow cytometry. Splenocytes from GC46.PF3D7_0725100 Immunized mice were harvest and plated at 2×10⁶ cells per well in a 96 well v-bottom plate. Cells were stimulated for 4 hours in the presence of 20 μg/mL brefeldin A (Sigma-Aldrich) with either 15-mer peptides for the PF3D7_0725100 antigen at 2 g/mL, overlapping by 10 amino acids (Mimotopes), or 1% DMSO as a negative control. Subsequently, cells were stained with Live/Dead™ Fixable Blue Dead Cell Stain Kit, for UV excitation (Invitrogen), surface stained with CD14 Phycoerythrin (PE) (clone Sa14-2, Life Technologies), CD19 Brilliant Violet 650 (clone 6D5, Biolegend), CD3 Alexa 700 (clone 17A2, Biolegend), CCR7 PerCPCy5.5 (done 4812, eBioscience), CD44 Pacific Blue (done IM7, Biolegend) and CD62L Brilliant Violet 786 (clone MEL-14, BD Biosciences), and permeabilized using Cytofix/Cytoperm reagent (BD Biosciences). Cells were then intracellularly stained with CD4 Brilliant Violet 605 (clone RM4-5, Biolegend), together with CD8 Horizon VS00 (clone 53-6.7), TNF Cy7PE (clone MP6-XT22), IFNα allophycocyanin (APC) (clone XMG1.2), and IL-2 FITC (done JES6-5H4) from BD Biosciences. To identify antigen-specific responses, data was acquired by flow cytometry and cells were gated on forward scatter (threshold), exclusion of aggregates, and subsequently to include singlets, viable cells, CD14-, CD3+, CD19-, CD3+, lymphocytes, and either CD4+ or CD8+ populations.

### Example 6: Identification of Protective and Immunogenic Antigens Using a Matrix Format

[0125] A consistent strategy was developed to screen protective antigens in mice against P. yoelii sporozoite challenge CD-1 outbred mice are immunized with DNA-prime/Ad5-boost vaccines expressing a combination of antigens in a matrix format, challenged by intravenous injection of P. yoelii sporozoites, and assessed for sterile protection by blood smear (FIG. 7).

[0126] In an experiment using this strategy, low level protection was observed in all groups lacking PyCSP: no pool of three antigens without PyCSP exceeded the protection induced by PyCSP alone (FIG. 8). When combining antigen pools with PyCSP, five of six groups exhibited increased protection compared to PyCSP alone, and the maximal protection observed was 50% of mice. Setting aside potential interference among antigens for the present, these data suggest that none of the nine antigens evaluated may be as effective as the current gold standard, PyCSP, but that several of these antigens may be able to enhance protection in combination with PyCSP. By summing the number of protected mice for each antigen, we determined the following antigen hierarchy: PY00357>PY02686=PY07361>PY02432=PY04558>PY03289. Antigens PY00070, PY01758, and PY01807 were least protective. This experiment demonstrates that these antigens can enhance protection elicited by CSP when administered in combination.

[0127] Subsequently, additional experiments were performed using an identical format with different antigens to evaluate protective efficacy of additional antigens, and also to deconvolute protection elicited by combinations of antigens. Importantly, while the combination of PY03396 and PY05693 together in the absence of other antigens was not protective (0/14 mice protected), both antigens PY03396 and PY05693 were separately able to enhance protection of PY06306 (disclosed in US 20170232091A1) from 71% to 100% in both cases, demonstrating the ability of these antigens to work in combination with other vaccine antigens and enhance protective efficacy. This is important because multiple antigens may be combined to generate a successful subunit vaccine against P. falciparum and/or P. vivax malaria in humans.

1. A pharmaceutical composition comprising an immunologically effective amount of at least one antigenic polypeptide having an amino acid sequence that is at least 90% identical to an amino acid sequence selected from the group consisting of SEQ ID NO:14, SEQ ID NO:15, SEQ ID NO:16, SEQ ID NO:17, SEQ ID NO:40, NO:41, SEQ ID NO:42, SEQ ID NO:43, SEQ ID NO:44, SEQ ID NO:45, SEQ ID NO:46, SEQ ID NO:47, SEQ ID NO:48, SEQ ID NO:49, SEQ ID NO:50, NO:51, SEQ ID NO:52, SEQ ID NO:53, SEQ ID NO:54, SEQ ID NO:55, SEQ ID NO:56, SEQ ID NO:57, SEQ ID NO:58, SEQ ID NO:59, SEQ ID NO:60, NO:61, SEQ ID NO:62, SEQ ID NO:63, SEQ ID NO:64, and SEQ ID NO:65, SEQ ID NO:66, SEQ ID NO:67, SEQ ID NO:68, SEQ ID NO:69, SEQ ID NO:70, NO:71, SEQ ID NO:72, SEQ ID NO:73, SEQ ID NO:74, SEQ ID NO:75, SEQ ID NO:76, SEQ ID NO:77, SEQ ID NO:78, SEQ ID NO:79, SEQ ID NO:80, NO:81, SEQ ID NO:82, SEQ ID NO:83, SEQ ID NO:84, SEQ ID NO:85, SEQ ID NO:86, SEQ ID NO:87, SEQ ID NO:88, SEQ ID NO:89, SEQ ID NO:90, NO:91, SEQ ID NO:92, SEQ ID NO:93, SEQ ID NO:94, SEQ ID NO:95, SEQ ID NO:96 and SEQ ID NO:97, SEQ ID NO:98, SEQ ID NO:99, NO:100, SEQ ID NO:101, SEQ ID NO:102, SEQ ID NO:103, SEQ ID NO:104, SEQ ID NO:105 and SEQ ID NO:106, and a pharmaceutically acceptable carrier.

2. A pharmaceutical composition comprising a DNA expression vector encoding at least one antigenic polypeptide having an amino acid sequence that is at least 90% identical to an amino acid sequence selected from the group consisting of SEQ ID NO:14, SEQ ID NO:15, SEQ ID NO:16, SEQ ID NO:17, SEQ ID NO:40, NO:41, SEQ ID NO:42, SEQ ID NO:43, SEQ ID NO:44, SEQ ID NO:45, SEQ ID NO:46, SEQ ID NO:47, SEQ ID NO:48, SEQ ID NO:49, SEQ ID NO:50, NO:51, SEQ ID NO:52, SEQ ID NO:53, SEQ ID NO:54, SEQ ID NO:55, SEQ ID NO:56, SEQ ID NO:57, SEQ ID NO:58, SEQ ID NO:59, SEQ ID NO:60, NO:61, SEQ ID NO:62, SEQ ID NO:63, SEQ ID NO:64, and SEQ ID NO:65, SEQ ID NO:66, SEQ ID NO:67, SEQ ID NO:68, SEQ ID NO:69, SEQ ID NO:70, NO:71, SEQ ID NO:72, SEQ ID NO:73, SEQ ID NO:74, SEQ ID NO:75, SEQ ID NO:76, SEQ ID NO:77, SEQ ID NO:78, SEQ ID NO:79, SEQ ID NO:80, NO:81, SEQ ID NO:82, SEQ ID NO:83, SEQ ID NO:84, SEQ ID NO:85, SEQ ID NO:86, SEQ ID NO:87, SEQ ID NO:88, SEQ ID NO:89, SEQ ID NO:90, NO:91, SEQ ID NO:92, SEQ ID NO:93, SEQ ID NO:94, SEQ ID NO:95, SEQ ID NO:96 and SEQ ID NO:97, SEQ ID NO:98, SEQ ID NO:99, NO:100, SEQ ID NO:101, SEQ ID NO:102, SEQ ID NO:103, SEQ ID NO:104, SEQ ID NO:105 and SEQ ID NO:106, and a pharmaceutically acceptable carrier.

3. The composition of claim 2, wherein the DNA expression vector is a DNA plasmid, alphavirus, replicon, adenovirus, poxvirus, adenoassociated virus, cytomegalovirus, canine distemper virus, yellow fever virus, retrovirus, RNA replicons, DNA replicons, alphavirus replicon particles, Venezuelan Equine Encephalitis virus, Semliki Forest Virus or Sindbus Virus.

4. A method of inducing an immune response against Plasmodium falciparum comprising administering to a subject in need thereof an immunologically effective amount of a composition comprising at least one antigenic peptide that is at least 90% identical to an amino acid sequence selected from the group consisting of SEQ ID NO:14, SEQ ID NO:15, SEQ ID NO:16, SEQ ID NO:17, SEQ ID NO:40, NO:41, SEQ ID NO:42, SEQ ID NO:43, SEQ ID NO:44, SEQ ID NO:45, SEQ ID NO:46, SEQ ID NO:47, SEQ ID NO:48, SEQ ID NO:49, SEQ ID NO:50, NO:51, SEQ ID NO:52, SEQ ID NO:53, SEQ ID NO:54, SEQ ID NO:55, SEQ-ID NO:56, SEQ ID NO:57, SEQ ID NO:58, SEQ ID NO:59, SEQ ID NO:60, NO:61, SEQ ID NO:62, SEQ ID NO:63, SEQ ID NO:64, and SEQ ID NO:65, SEQ ID NO:66, SEQ ID NO:67, SEQ ID NO:68, SEQ ID NO:69, SEQ ID NO:70, NO:71, SEQ ID NO:72, SEQ ID NO:73, SEQ ID NO:74, SEQ ID NO:75, SEQ ID NO:76, SEQ ID NO:77, SEQ ID NO:78, SEQ ID NO:79, SEQ ID NO:80, NO:81, SEQ ID NO:82, SEQ ID NO:83, SEQ ID NO:84, SEQ ID NO:85, SEQ ID NO:86, SEQ ID NO:87, SEQ ID NO:88, SEQ ID NO:89, SEQ ID NO:90, NO:91, SEQ ID NO:92, SEQ ID NO:93, SEQ ID NO:94, SEQ ID NO:95, SEQ ID NO:96 and SEQ ID NO:97, SEQ ID NO:98, SEQ ID NO:99, NO:100, SEQ ID NO:101, SEQ ID NO:102, SEQ ID NO:103, SEQ ID NO:104, SEQ ID NO:105 and SEQ ID NO:106, and a pharmaceutically acceptable carrier.

5. The method of claim 4, wherein administering the peptide to the subject comprises administering a DNA expression vector encoding the peptide.

6. The method of claim 5, wherein the DNA expression vector is a DNA plasmid, alphavirus, replicon, adenovirus, poxvirus, adenoassociated virus, cytomegalovirus, canine distemper virus, yellow fever virus, retrovirus, RNA replicons, DNA replicons, alphavirus replicon particles, Venezuelan Equine Encephalitis virus, Semliki Forest Virus or Sindbus Virus.

7. The method of claim 4, wherein the immune response comprises inducing an antibody response.

8. The method of claim 4, wherein the immune response is a cellular immune response that comprises inducing a CD8⁺ T cell response.

9. The method of claim 8, wherein the induced CD8⁺ T cell response comprises CD8⁺ T cells expressing higher levels of interferon gamma (IFNγ) compared to CD8⁺ T cells that have not induced.

10. The method of claim 4, wherein the method further comprises administering a booster composition to the subject, wherein the booster composition comprises at least one antigenic polypeptide having an amino acid sequence that is at least 90% identical to an amino acid sequence selected from the group consisting of any of SEQ ID NO:14, SEQ ID NO:15, SEQ ID NO:16, SEQ ID NO:17, SEQ ID NO:40, NO:41, SEQ ID NO:42, SEQ ID NO:43, SEQ ID NO:44, SEQ ID NO:45, SEQ ID NO:46, SEQ ID NO:47, SEQ ID NO:48, SEQ ID NO:49, SEQ ID NO:50, NO:51, SEQ ID NO:52, SEQ ID NO:53, SEQ ID NO:54, SEQ ID NO:55, SEQ ID NO:56, SEQ ID NO:57, SEQ ID NO:58, SEQ ID NO:59, SEQ ID NO:60, NO:61, SEQ ID NO:62, SEQ ID NO:63, SEQ ID NO:64, and SEQ ID NO:65, SEQ ID NO:66, SEQ ID NO:67, SEQ ID NO:68, SEQ ID NO:69, SEQ ID NO:70, NO:71, SEQ ID NO:72, SEQ ID NO:73, SEQ ID NO:74, SEQ ID NO:75, SEQ ID NO:76, SEQ ID NO:77, SEQ ID NO:78, SEQ ID NO:79, SEQ ID NO:80, NO:81, SEQ ID NO:82, SEQ ID NO:83, SEQ ID NO:84, SEQ ID NO:85, SEQ ID NO:86, SEQ ID NO:87, SEQ ID NO:88, SEQ ID NO:89, SEQ ID NO:90, NO:91, SEQ ID NO:92, SEQ ID NO:93, SEQ ID NO:94, SEQ ID NO:95, SEQ ID NO:96 and SEQ ID NO:97, SEQ ID NO:98, SEQ ID NO:99, NO:100, SEQ ID NO:101, SEQ ID NO:102, SEQ ID NO:103, SEQ ID NO:104, SEQ ID NO:105 and SEQ ID NO:106, and a pharmaceutically acceptable carrier.

11. The method of claim 8, wherein the DNA expression vector in the booster composition is a DNA plasmid, alphavirus, replicon, adenovirus, poxvirus, adenoassociated virus, cytomegalovirus, canine distemper virus, yellow fever virus, retrovirus, RNA replicons, DNA replicons, alphavirus replicon particles, Venezuelan Equine Encephalitis virus, Semliki Forest Virus or Sindbus Virus.

12. The method of claim 5, wherein the immune response comprises inducing an antibody response.

13. The method of claim 6, wherein the immune response comprises inducing an antibody response.

14. The method of claim 5 wherein the immune response is a cellular immune response that comprises inducing a CD8⁺ T cell response.

15. The method of claim 6 wherein the immune response is a cellular immune response that comprises inducing a CD8⁺ T cell response.

16. The method of claim 14, wherein the induced CD8⁺ T cell response comprises CD8⁺ T cells expressing higher levels of interferon gamma (IFNγ) compared to CD8⁺ T cells that have not induced.

17. The method of claim 15, wherein the induced CD8⁺ T cell response comprises CD8⁺ T cells expressing higher levels of interferon gamma (IFNγ) compared to CD8⁺ T cells that have not induced.

18. The method of claim 10 wherein the administration of the booster composition to the subject comprises administering a DNA expression vector encoding the at least one antigenic polypeptide.

The application's sequence listing, which the Patent Office published only in electronic form, follows.

SEQUENCE LISTING (106 sequences)

SEQ ID NO: 1 - protein, 274 aa, Plasmodium yoelii
MLEAKLNNASILKKLFECIKDLVNDANIDADENGLKLQALDGNHVSLVSLHLVDSGFSHYRCDRERVLGVNIASLNKVFKLCGINESVVISSKDDEDNLNFVFENNKEDKVTNFSLKLMSIELDSLNIPDCDEGFDAEVELSSKELTNIFRNLSEFSDTVFIEIDSNSIKFTTKGLVGDAEVALKPRESTSEDDVGVTIKSKKKIKQSFAIKYLNLFSKSSILSDVVILGLSDSRPIEFKYEIKDTSPDSDALKVGFIKFFLAPKMDDDMDNKD

SEQ ID NO: 2 - protein, 227 aa, Plasmodium yoelii
MKNGNNFEDDKERDGKTKMYVIIYNIGKKKNIGNIVRSCVAFNVSEIFVVGRNKKETSFFGSMGTHGYIRIRYFSNMIELKEYLNDNNILLYGCEITNQSIPITKQPFVKNKDTAFLFGNEGTGISDQIIKMCDKIIYIPQYGNGIASLNVSVSCAIILQTFAVWANYIEVDIKGNKFIIQERQNKLNNYLNPSEELIKEINDKRTIREIKKKEIQLANLDNLEFLF

SEQ ID NO: 3 - protein, 241 aa, Plasmodium yoelii
MPQFFTCIIYINKYFRTNKKYMKVYKMNTLKVFFVFYVLYITTFFFNPCFCEDADYYSEIDDGALDSIDTAIKKKKKRKSVAIALLSSGLVASVIGVLYYMYKSHNKGRHDWNKGFNFFPFNKQTEYKQPDGEKPSTSTKYEEPLGVNKVNIKGKLKENNNDIDVPLKRFNTFMDNVKLAAKHHFSNLSNEQQKYLIKDYDYLRKIVQTLDENKDVNISRAQEDIAVLGVEHFLKEQYQPK

SEQ ID NO: 4 - protein, 1368 aa, Plasmodium yoelii
MGVLKLKSEKKKREKIKETKIDYERCFKKTKIKDTLNKKDEGNEFDISVFMKTSHSSNKIRQINYGKLIKNIKNNNNIIFNNIEKILEIFANGIIDEDECIRNYSAKIFYYILNSYINCDIYFNKIKTSIFYSLKGKIEKLKIYNLELCYNLFFKKIEYSHNFFYDFLHAILDCFVSLSINNKIKNVKYIFLLFDQKVRHKRCVKLGKNITQIGNGKIKKNGKIKKNGKNDISDVSDYFRKNTHLDDDQKCGKDEYENIIRQNIINNNCDNFLIKKNIKTNINIDTKINIYVKMFKYLYNFLDEIECNNMNVEMISLYTKISKCIIYFIKKKKSIIKIDTILLINKFIKKFIEIINNKLNILKDIFNISILLVFRLLDMIYYFIIMIIFLCVKNINLFEIVKKKIYIDFIYLIKYCVTIYLYVLTVFNFFKINKNITDYDQELNKYADTNKIGVDNEVKILCTNYMKRWNKKEFVVKYFKILIYFYNIYINIKEGKQKMFINFIITLGEKNLIQIENSEKKKIINVIIDLIKEKIEIYNYDNEEKLIWELLLNYVNNFSEKSIEKIIYLCYYIVILSQTSQKKKKKNDEIGLKHLIEERGINKREDEDKNMISEKCTKGNNKINDKSNHDDTITLSFFTTPFIFIFLTDCNYFINNNFFEFFYKCMKINDKEHVMKILLFLQKEENINIIPKNVFDSFVDNLIYFMNSHNNKKIGKNFANSFANSFASSFAKNFIGFILIIKNGIKCKNGNSRLRNVNRGVEEKCEKLILLDIREKLKEIFEEKKEILINYFLNKNNSNLLSLKIIRIIYDIYGDENCKVLNFIYWIIIKYINGKYGDNLILGKKEVKMLLYSIFYGDEINVYTHFDKNIEKKKIFSLVYNNDCFDILKEDIKSEVYILDKYLYKDNFLIFFLNLNIYKTWKIFKNDVYSFIDEENSYKNISIKDSLKDIKYTNLILILKKISYITSHINIYSLSNSNKWINNKNIIISYIFKLIKINIYDKLYDNVYSDNIYITCDRIFINIKIIFFFSYLSYYLFDSLSLEKCEDNVVLIKNFKDEIEESQQDIELNSSSNDNISKKITEQIGKNVDPYYDMSNKWIENIMSSKLLTFLKSFLNDANKKNVNEIDSENGFEDIIMHINFSKDLFNLIYDKRNCFYYLSAINVNLYHNSEEDVDNDYNFETHKIIQELLNNFEINIDIINFKELTELPVRKILVLFFLSIFRILYNGNILKSLSLKFENGDIKKYLIFLNYFIFFNYFVSYLSEEVKLATSKHFSCSTYYTISFLLDIILCFYGIGEHVEKMEEFPEYSELKRKENSKNENSKNEIFMEIRNELKILNNKLKHTIEELSNKGKKYIFPQTEILINKI

SEQ ID NO: 5 - protein, 1154 aa, Plasmodium yoelii
MNLTSTFKRNKRKSNEGISHDITKKLKHCNMLKPLLTIQRDELIASSLFAKGLCKDEKISEKISEKISEKISEKISEKISEKISEKISEKINEKINGKNDKMGTDKNDLNFNLYESRDFGYICLESVKNESVKNDNSTKPRQNNFNNNEDMCRMKRLPKMGKSGKKSEKKKKSKKKYKNNHNSCESNYSSSNERKEIFETQNYNTEYLWEGLLKKDVVLLLIQAIKNMGYKKSAKILESESGIELEQPLIKDLHKNILKGNWGNSINNLKKLNINKKLMKAIKFLIYEQSFIEYLNQGKYFSALRCLRNKLRKACFDEDTYKRLHECTTFFMFQNLENKNNIINNTQFYYINDNIKLRNSRKILFDKINRLLPEHILIPPRRLAILLHQSLKYQIDNCLFHNHFSDLKLTKNMEYNKILRKSCFSNINFDHHKNEQENKIDDIIFKDNEKKKKNLYNNYFFRHKYCKYNNSCETKPSQYNYTDNESSLCISTLNINNIEKLKTNNDIQNGQHTYINYSIEYPQTVESNSINYVSTNIPDSPEKVQDAYLNIISNAPTLQLLKLSDGKCQGGVGPDIEKGAKNGEKNAEKNAEKNSEKNGEKNGEHNGEHNAEHNAEHNAEHNAIASNLVNHSLSNNIEDVEKEETNSNENQILELNKKYNCSCEIKKIQCDCITFGDNNAKICQNGNNTILYNETKEISSFTELEQNGNLKNDKINLKNSKINLKNSKISLKNSKISLKNSKISLKNSKINLKNNKINLLNNYNKKYIDKISCCTHLSLLKNHECKKIKLPYYCIKVLQGHTDEVWYVSVSLDGKYIASSSKDKSIFLWKGTYPFNKLREWNGHLDGVSYICWSYNNKYLASGSNDSNIIIWSPKSNKKKLCLTMHSGPITSVCWTKNNSTIISSAFDKKIYCTKINIELKSFSILYAWSFSTRIQNFVFTKNEKYLIVVPADKNVRIIDFSMKKELYILPENDTITSLCASNLYNHVLVNISDQKPIIKLWDIKYRYIIQSYRGHKQGRFILHSTFGGKNEDYVISGSEDSLIYIWHRTKGYLLDVINGHASNVNIAIWPLAFSKFPYMISASDDHTIMIWNTHPKINKSKKHIYMEREKKRNAEKEKKKSKKNIFHHPFLRELAKLSGMDVQILSPNDSHMF

SEQ ID NO: 6 - protein, 297 aa, Plasmodium yoelii
MKKMSAMSIKVDNRYIIKEKENTNNQCDQINVDINHIIKDIYGFNCNKKRSAHFISDNTINNSQDIKNLYKKIKIQDYNNIIKTTESHDNKSEYDHDTSTIFDNNENKNCINVGSGNEDNNYGYPNLKSNRKSTKNSRDNNNNINDDVEKKKRICNNYTDNNVNEEIENNLSKKFETLIDNVLEKISTCNEINQAKKIMIPMISNFIQNNFESNNNSKEDNKIENEILQKEKKVLINAVKTQYHKIINLQKVIDNQKIELKKKNDELNKIKAKVHEYFYDLNNSNKRVFNILTPDVY

SEQ ID NO: 7 - protein, 463 aa, Plasmodium yoelii
MWDLINYNIGGNVENNENSENSENNENNEKKKDDQSVNQNESTNIDLVGNAVDITNTLYEQVRNNNTAFWSMLGYEENSNQVDQNIPNQEEEGYTETMQDEGENKKEKDFERIDDTQNDSIEEMERILEENAKAKIEKKKKHKKKTEKKSSKNRLDTKDIFESDNEINKSPFFSDISSYADYCTSDDGNKKKNKNDKITLPVNKKEGKSNDENFNMINGKTKRDYPNYKNGVKENQNEYNYSEKEDNHSDNSEQNTTSAPDTVPNDWFFSKIKEIIEPNINQETLNQLITNNYNSFSEANTGIYDLIDKIIRTNNNTYDNSQNSMSIINKQSYHGNIYDHYNSMDVSPNDNYNFINYSIYCINKELSANVETEAINMMKIYAHTFNKYKKDINYKDDLYKDLLNEAEEQSTIILKNNRKKRIYKIDFFNLANMNSENYNNIVESQNVQTPKIKLEDIFKISVN

SEQ ID NO: 8 - protein, 218 aa, Plasmodium yoelii
MDYDIEINAPRTHKDYIMYIPIVLGEMIKMSKGDGKITTFHASQVPDISIKNYVERIGKYIGCSNECFVLLMIYLDRIIKIHKDITLSLLCIHRLIITAAMISAKFFDDLYYSNAFYAKVGGITTKELNKLEAHFLNLLDYKLYVSSNEYNFYRKYISIAVQKFLNRKQSKPVSIVKTYNLFNYSSPNMNNSMFLKNQDKNTTTSTYLMEKNKNEKKR

SEQ ID NO: 9 - protein, 966 aa, Plasmodium yoelii
  misc_feature (814)..(814): Xaa can be any naturally occurring amino acid
MNIDLTDSGYYQNNASSDNVENKKNNNCIELVKEKIFVYKCNICLLVFTCVHIFERHIIKENHRVKQLDVLKKDKYFNCLRCKYICLSIVKIIKHIELYNHGQNILKKIKKKILYTGKAICECKIKCYSIYSQSQVNLENKESIKNKKENYLKVGINDQVNIKRGNKTNKEIEKNRNDSYIYNKFESNNPFIRYIDQKEYHKNSENNTQIYDNLSFFFQKNNATNNPKIRDDIYTKFLNKDTPMHSFPPFCKNLSQKHDTINSRNFKNNAMNRIIYDEVRRISSDPYCINNKNYNIFDEKIIAKGNIITRTTSSSSSNSEDTTDEENNFNNNWPDLQKPENQQNKKYIYKNSNDINHNLLLDIYSNNFNFSETKNVKDFSLNSFNEKKESEIYDIFENNNIPFRGEPNIIYDDNAKITKDKFDNFRHKKNADNYQWGMFNWDLYRSLEKTNFNEPQKIEKTNERNISDNKNYNNRHYIPFNFKRGEKENKVYRNISPPKSTNEKKLLSIFIPDLVSNILGKNDEEKQNETNSYFSNIPKNVTDYDILNTQHLKNKKVSFTKLSDTNNSDVHTQNNDYKIKSKNDNIYNEKNEKMNENITSQTNKIRKHLSENYIFHENYNKKNNEHENNHTIFPNLNNEQFSKIQYCDMVLTDNDNINNKSIVRNNDDDDENNKYGNTFICNKINKIYDNLSCYETFQNELPLNMDYINENLNSFPQSNQAIETEKHKHINIRNKQKIKDDIVIDETNCTFYKRNDNNPNFMDNMRTKNNELLNIFHNLNLKKINDTEYSLKNKTQRFSTSNMDDFAFLDCTNXDDQNKINNNTFWEFINYYNNNNNNTQDGQDNKRNINFIEKTEDDSWDTFTNNRNDNSEFSYNDDTIPDWIAKEVNSNNSDITFDEQYQWKQQINCNNIYAKDEKQCTHIFNPKNGEEILWDSIDKQINHHIDYGNWNSSNEKDKFGMKNKKG

SEQ ID NO: 10 - protein, 1121 aa, Plasmodium yoelii
MNNFVENDDINKKECNDNIFSVIPKKLLNSSNIIHVKKEDKDYILVNKKNEKISKSENVEICLKKNGEKKNPEKFLKFSETRKICKNFNYNKYYERVKKWKEKRCQKFKGQNNFIKIGKIGKIKINKRNAVKIEPKQNKYKKTQKQNSVIYGIIQKRQKQITKLDSNSTHPHQINQEKDPKTNDEIISNNMKLEKSINHKNDDKDSSRINTQFNEFCKEMNYNNMSHIYRNIKISNETNPNVPYSNETNPNVPYSNETNPNVPYSNKTFMDSFNNLNFLNHNSNNPTIILPSNETSTIDFENNYFLNMNDENMIKMKKYINNTSQTKYTFDNLTKKNNQNKSNTYEQPFLTIYNSPSHTNITSEQVIKKETHNLVNGTIKTSIYKERNEINNKSIEYNDSNNILINNNLEHYKKFCKNNINKFNYLKFTNKKINNSSYLNIKNPFMYAYKRVKLLENIKNETDRKKKKMKKNCLEYGIDQKKTDYNESNTIASLCEQNYQNINSDSINNSENENNKKTLKNNLEKYKYSTCENFSFNNDLTIDQTQLHNFSITFENYRKIYKNISSVKKKKIKSKNLLNPMIHNINWLSNPIKIRKSDPIQNQLNQLNQLNQKWNISNNNILKPPLNSHKIMQISEEIVNPNTHKKLIQITEKLIERNFDLFLCLFMKYEHQDNYLFCLIFDNELTKDSFFFQSCIKPMIDNYKKLKCEKVRNEKRCDGEHIEPQDYKSIQINKIIIEIMIPTIKKKYFSYLTKLYKEKKKSSSEIDSSDELEKEIRNINIKIENINITKSMNAKDEKDKNISSKKNNNYEKKIKLINKPNWSNKKNIQKLLKRQHNYNPFTIFGTSISEVNLEEIFTLDVYNNYVTNEDRFKNKILYELYITDYIQNLYEKIEKQEWTITLDTLKKHWKYFTNLECNMFLDPLLLEEILWYIDNNKMYKDKSMKTYTYEKCFCPTPDPSNKHNLNDTKYFTKSMAKKYTTEKSDKYKNLSLNECTTCHYNDFVLKYNDINFDQNIYSTISAHKKKFIKENILYNIPRPSCSFEYDSDFFHNKVHKHIFRSKKIAHNNNNNKSPTISTENEPYIIKYKPQKWTSQKLFDNFFYNYYLYNFNKRSKKCNSII

SEQ ID NO: 11 - protein, 563 aa, Plasmodium yoelii
MNCLHENELPYTKNKKKIEKCYKVWEKIISKGIGCRKEEIKNNITKRKRDKERLISTLYGSVFKGEKYLLYSKKWRGKTLNEIINQDKKNYLNLKNLKNLKNVDNSYFCKLAIGYLDQENNHSLKKKTDPECVQNYDQNMDNKNINTNLKKNQSINNNNTTLINKKRNQSIEKNTEIHNNEDVYEKLNYLEKRSYRNKIKANTNYNCNTINNNLTTNDNDVTNSKTNNHDNTVLNNNNNNKDHINNRDNNMSIHNVIHNNNEIKNGNIGCNTNNNKDSYNNDNNNNYYYPNFDTNKNYNNNQIHNDNKCFEKNNNENRLIKYKYLPTGVFYSRVSRSFIANWIDDKTKKQIKMPYKISEFGVEKCMILAILSRNLRISNLNNCLKYYDKLTEDQKEQMLQAIRTTQKSEKLFNDILKPNIKNITNSVNDICSASTSNSNKNNENEPKNLNVKNKIIEKKKVKQSYNNAEKLPTGVYFYQGSYVANWWETNQKKQFKVPFKISEYGMTRAKNLAIISRLIRSSSIQEVNLILTQMEQNKNITKLNYTTILNLAFKYMKNPPKKY

SEQ ID NO: 12 - protein, 347 aa, Plasmodium yoelii
MIKRYLRVYPSIYFTKHVYSAPQVSSNGEVVKKDYVFNQYGKEGIYLNNKLKKGNDKNAIKRIYYFKLWNALTQYNFTLFENIIQQFLNEGHMYDEVIYSIIVHSYVMNHRKKVENAYLVIEEMKRCYMHPAIIKINERMINSYLELQMIFCEPSKSLWMNICRLTWEVSIKLNRERKRKLKEKLNSLPPNDVLKLTKDDLKLMLKKEYEDSLANMIDTISLDNETPYEHMLIESSEVYNEEENEENKQSLSLLENDMIIIDNKDENSSIYVDMNSNYIDDKIKQDETDISMFLKNDSHNIQNICDWNDDWSGADDDEKEEDEHQESCENDEDFDIQLLKKYYNRKS

SEQ ID NO: 13 - protein, 1488 aa, Plasmodium yoelii
MRYSYFIWALLLILSENVSIFALKCYNRNPVRTYIVVNLKGQNNNLVGKLLKNEATQKNRQKELYLKKNKKVMSLLRIKGNKEDDITYEEIEEYLKNEDVNNSDEDDGKKEIMKLINYIPTLKNEEEFFSKYGYKTFNNKRGNKNTIEYYLNEMKILKEKKEKKNYNILNLILSYYLKRPNDENNLPYNKYYQNIQSYYYYINSLISRQGGFLSSFTDRLDKKENIFYRTGLCNFLSFYLKNVNILKYGSFFCLSGVFAFLLKGIIRNIKFEDMFLLQNYFKLIYSIKSLSIYKIGIFSILFNSLFLNKYNQYFSISNDLFGMLFTNYFFYEGINNLTKKKIENFMDKYNCTKEDIFNSLNDLFSQFLNKQIYIEKEMDEKIIYNISSFIKLYKKLFINNIDNIKNITFLVLNKYNVYYTSVDNTNKTNSEVLSRICYIFYIINILLKYNISSLQNFNLINNNEYNIPMFKSNNKLSNYFLLTSIKDHLMINENVINDCILDRMKKNYEKHIYSLIENKNLSTNIFDDIKKLDFLILDKSLINEVNLSIFNKLVNDILEKKNYDTPYFKHNQLASKENGDFSNVKSNIIEDTSSTGQLMGNNEINGDEQYLNNNVIKDDQNSKDDDDDIEKYYSENTNYEEEETEDIEGTDAEIYDDNENIDERMYKYIEDSVDYIVEGNVKKDEQNQETKSSNGKDNNNKSDEGEKKELETMLKKIKDIHSFRKYLSIPKEFVDNQLEKYLFPYMNKEYKIFLNNLIFKNFKNKNENLFFLKNGITLSSECTENIIKNIILDFVIKTKENINIFFKLDNMDKCLKLVLNLFYVYKKLKKKRKYIKTKNMILNLENIFSHNSFKGQTFGKQTISSETTKETTVTDYTDDTSILNKINDTKKNNVNENIEKEDYIDSDISFPNKKDEFLCNENFERNMREEEEGEEILSIDERKRLYEIFVLKYMKNKSERNIFKKVFKLDNVEIDKEVEDNIIKNFLEKVVKSNLENLKKLDSDLGIINNENLFDYKNLNFIDKLEKVKKNNKHDSNVNINKYIIKKDDIFEYIDDESFEEISKKMYINKLLLLKDNLYNNRKDLYLYEIILNINNSEGIHDIYLIDQYEKMINDIIKTNLLNKNYTNIKNMYLKKIINFLNISEQKATDVELRCIYDHIYSIFLSIKENFYIYKTDSDFFNNINEILTIYNNYDLIKKNGEGYLLKFALIETNHNLLQKLIERYVLYVIDIINNENKLTYKENIFKLAKILNVNNTIISDIGAKIYKKYIENQELHAMNNMDVFFNFLFNMDKGKQGEIILDYLRQKVQNHLNSNESYQEKLQKLYDLLNFINNNLKLNKNMFDFYHQNGEIIYEFLISCIEDYLDRKKSTTFISSQSDYMMHFNNFLSKIKMLIKGPEEKSHFTHVLNILKKSIIKKAISFMENFKYDLCVEKLYNFIKLQMIDNTFVLSDIDIEQRKKMINIFSYQNIDDEKKHLYMDILNKALL

SEQ ID NO: 14 - protein, 257 aa, Plasmodium falciparum
MKTEEKKSLQEKEENNCNDDNLPTNVDINDNNMNNISYINDKLKKDSYEKIKTYVVIYNIGKKKNVGCIVRSCVAFNVHKIFIVGKRKKEINFFGNMGTYDYITIEYFDNIYELKEYLTKHDILLYACEISVNALSITTNPYEHKDTAFLFGNEGTGIHDNVLKICDKIIYIPQYGKGTASLNVSVSCAIILQNFAVWANYEQTEIKNKKFIVQKKMSKLQKYLNPTDDMLKQIHFKRSLRSQKKKENHIISFENFI

SEQ ID NO: 15 - protein, 1526 aa, Plasmodium falciparum
MIKYRLFNICIFLLFILFNYFCCALRSYKKYKVTTFIGSTPQKPVHLFNSRVVKKNIFLWYIKKKGGDICKSVNSFNLFEKKNNNNNNDYNDDDDNNNDDNNNNNNDNDDNDNEDDITYEEIEEYLKKNKVEDYEEDEGKSEILKLINYIPTLSNEEEFFSRFGYINREKKSMEYYFNQMKNEKERKQKKNYNILNFILSYYLKKKIFNDVHSNKNYDSIQSYCYYINNLINHKDTSLEWRNGNLSKKNNIFSNKWLCSFISFYLKNVNALKYISFGCVSAGLTFMLKYILRNIRIDNIFLLKNHFNLIYGLRNMKIYKIVLFCLFINVLFINKYNQYFSITDDGFAVLFSNYFFYEGIEHLNKKKIYQFMNKYNYTLNDILYSLNDMFIYFLNKKIYVDEIFDPDIVIYIDSFISLYQKLFKTNKENIKNILTMILNKYHISNVKNENKNKDLLSRIFYIFYIINIKFKYDVIQAHKLNLLRGENKYMIPFFFKNNNISNYFLLSHISDHLNVKEKIINNYLLEKMKNDYENYVLSLLRTKTYSNSVYDDIKNMLFITLHSSVIDDVNVSIFMNLVKDIISNVDYECKYTSRSNRKDKIVSEFEMDGNDVLKEKENISSNNNDDDNNEDDNNDDNNDDDNNDDNNDDNNDDNSNDHSNDHSNDHSNDHSNDDNSNLESNEFNENNLEKGFYSNMEESVDYIIHDNNSLKNATKNTGDISTEKIKKNDVILSEKEELKEKEQLMKKLNDIYFLRKYLNIDKEFTDNFLEKYLFKYIYKEYKIFINNLIFKKLKNKNDNLFFLKRGINLPSKTTQNIVKNIILNFVIKTKENIAIFYKLENIDKCLRLIVNLINIYKKIKKKKKFIKFNSNIFNLDHFFSYNCYKENEHTDIIQNDQSSNIINNNDNISQEDHMVNDHGKNKEENENFSSDEEVNLNQPFLKEEEEFIKHNIYKEKLCDENEGKIILNKNDRKKLYEEFVLKYMKNKSERNILKIIFNLDYDNNDIDKEIEDNIIKRFLEDSTKNKLTNLKNLDMQLKIIGNDNLFDYKHLNFNEGLLIKHNFKKSLKDEENKKMSLNEYIIKKEDIFDDIDDESFLEICQKMYINKLFHLKENIYNNRKELYFYQVILNIEKNINEIHDIYLIDQYEKMINDTIKTNILNKNYTNIKNLYLKRIINFLNISEEKASIVELNCIFHQTNNIFKTIKENFYIYRNDSDFIDDINEILTIYKNFDLIKKVIRNNQEMYFVKFSLVESNYNIVHKIFERYVLYVIDVITNENRNMYKDNIFKLRTILNVHETTVNDISTKIYRKYIENQELHSLNNMDSFFNFLFNMSKEEQKNIVIDFLRTKIDTYLKSDENYDEKLHKLYDLLIFINDNLQYKKNIFDLSSLSSKLLYEFLLSCVDNYIHTKKTDAFIKSQADYINHFNNFLSKIKALIRGPEEQYHLSHVLNILKNDIIKRAINLLDKFEYDMCIEEVYNLIKLQMIDENINFSDIDIAKRKKLVNIFSYQNISDEKKFLYMDTLKK

SEQ ID NO: 16 - protein, 407 aa, Plasmodium falciparum
MSGAAIGVENRCLMKNKNNKNNSCEQVNVDINYIIKDIYGYKNCKKRCIQFIEDDTICNDDIDLRKMKNKKIKVENMWYKRYDSNDMNNNNNNDNDNNDNNNNNNDNNNDDESQHNNSNNNDVDNNTFKRYNNYNEKYEENDNMEKEVYHTCSIQSPERSAVHNNNNNNNNNNSNNYYYMTYQMNDEHIKNSNNIKIHNNVNINMSSNNVDNNDDANSIDSNDDSNNMDNSNDTHNVNNKDDTNNKYNHVNHNYYHKKRNKQQPILSSNEPEDKYILSKKTESLMDTILFNIHSCSELNQAKKIMLPLLNDFIQNNFYKYIKFYEDNQNSSKHNVQTLQKEKKVLISAVKIQYQKILQLQKLIENQKSDIKKKTEELNQIKAKVHQYFYDINNPNKRIFSILSPDVY

SEQ ID NO: 17 - protein, 1576 aa, Plasmodium falciparum
MGVLKLKSEKKKKERNQKETKIDYEKCIKKTKVRDNVFVKETVENDFDIRIFMKTDHSSNKIRQLNYAKLVKGIRKNKNLIPNNIEKIIEIYGLGIVEEDKNIRNYSSKIFYHLINNINYDKFFGKIKTCLFHSLKIEKVDLKILNLELCHKFFFTKISYCNKFFYEFLNNILDCFISLSIEKQIQNVKYIFLLFKHKAKYKRQKRKLLQLKKKGIKITPSEIKNKSKKQENKVGNMEFKNFKENKDDNKNFDNNKSFDNNKNFDNIKNGDNDKSFDNNKNFDNNKNFDNNKNFDNNKNFDNNKNFDNNKNFDNNKNFDNNNSYSSDHSNNNYEHISFRNLRNNLRDPFLIKKGIRIKLDENTKMEIYKKLFNCLYNFMDEIIYNSLQVDLINLYTQILKNIIFVIKKKINLTIEIMFLINKFIKRIIQLINENMLNIKNEKLLNMIYYFIVLIISLCLKERKYFKLLKKKIKMDIIQWLHYGFVIYWYVLLKENFFNIPCHGQNEKKEIKNFYVQHEDICEHTIGNHMLGDKLKMCTSNINDVINCAHMGNKSGTDEKEHNNDSNNNKNNDSNKNNYHNNNLLNVYELHNKNSSACDDKTFHYNNNKKYAKKYFMLLIYYYEIYINRTNSNILLNYYINKKKKNSEENKQENKDLHKKIMNKIEGYTKCMFHRNNDDIEKLGKYIMNYLISFSYNSIENIIHLCYNIILLSYKDIVNLYTMKNEYLYIEKNEKDKNKDDFLLYSFKYFTTPFVFLSLVDCTNFINNDFFLKSFYSFFKEEEKEKIIRTISFIQKEKEYVHMIMSNHIFDNFMNTLLYVLYNYSDEFFVNNCLFFLCMLKEKQRGVLERKDDNNKDDDNKDDDNNKNVNHNNINNHNNINNHNNINNHNHINNHNNINNHNNINNHNHINNHNHINNHNHINNHNNNHNQNVESYNVICDNTINYNIMLQDNNWEDNSVHNFSNIINKKMNNIKKVLIDYFLHKNNSYMLSFDILKILYFLYEHTNIKLLMFIYYLIINCVNIFDKNGKTKHPFFLNTREAIVCINKIMGVNYIKHMEMSNKKNEDLYIDIDKKKYLFIINDEYIYKEHFVLYFFKLNLYETMKVCENYVYDLLVDLQNVQQEKENEDDDDEEEEEEKKKKNKITKNYITLNNLKYTNIILIIKNISYIIANMKLHSSHLPLENINISCIKLNYLFCLIHKLENVNENLSDKVFKIIKIITLYYFVCFYMCPPLLYDTNKQTYDKEHDNNYLGYDNTSGEEEKKNSHKRRFCEISNCTEDAVHLKTHKDKHHNMNDISDIRYNEKENDEKYLIYNTNIKFKVDISVFSLFLKNYFNNYMNIKNEAKVYGIEHILPDFFGIEFFNILLEKEIYYYVSINNKKNFENVTYDNNEESYNYITHKYIEELINKYEKHINFVSFKKLEQLPIRKIIKLLIVSLFKMSYNRNIFFGPFSYNIKKDILLNMFLDNLNFVLIFYYFLSYLINRLHSFLDVAYSLKNYYSVWFYVDMILCCYCIKEEKMKKLKLPWSKEYEEIDLILNEALIDLNKKVKHMLDLILKHDERYNLINNIGKVYEQL

SEQ ID NO: 18 - protein, 1095 aa, Plasmodium yoelii
MMKKIIMITNLIIIILGLILFNCSWCGSKDIILNKTNNDDDNNNNNNVLFSLNYKIRDKIHKGKIIHADGIDSYGYKQKGVSTVIPLIHESKIKDFFSINDDEQTCNYHIYKHGISNNKYNIKCYQNNFCGLLPNNKYIKEIQNDLLYCTHFNNKEMIIYHISEPELLKPDVIYQEIIFLENQKKILINCNTMFIDIVSINSIPFTYCLNDNLLLYGLKLCANKTYCYINFSKFDVKSCPIYDSYILHIKYRCKEEPNRALIKNDSINSKIKYSERICKYGYNIIQNSLLNKELIYIPKSDIKNYRKFLSNKCEKNYSCGNKVCSVNQYCDEVTETCRCKKLGIPINEQTCEPIDVCQLLNCPEDSICVQNKITNKTECKCNDNKYFYQNKCYDSHEFEDFLKLNHIEYSQTYIDKLYTGSALKPEHIFMECPKDFEIKIINAYASCYNIPFSLNNIHKKRITAILKKECNGKNKCAYGNSIYNAEILYYPNICTGEFIYFKYNYLCKEKEEDDEDDETDEHHSEKTKLRLENLSKNPVSKNINEHTKIKSNQNVTSYIKILNNTENSKIECLGGKIQIRSAIIKGGPGCEDLNITTSVQTYCNDTSNCDIGSMYKFDTYCINNQYLYVSYECKNLCTYCTSDSSCYGNKFNHRCFCDYPYISKNKDNNVVCEIPTSCSSIKCRQNEECKNSNGYIYCDCINGYNIIDGVCQKDIPCFDQCPTNKKCVVVKGKNVCKCISRLLDKKGKPICYDNESDDDYDVLYASKNKCKKKEYINMCNKNKENCVYYINTDEARCECKDHFVRSPKTNECEAIGYCDNIECKKNEECIYSNGKGECVCKDNFYKNGEGKCVHNNLCTVNNGNCTDQANCIYHEDKPHECTCKKEGYVFLNNKCVIRDKCSEKSYCSDNSICINVLNKEPMCVCTFNYIKKNDLCILKNPCLLNNGNCPKNSICKYQSDKTTCTCTENYTQKNNICEPLIDQTYQKFLIKYNEDTYISLGGCGIIYFIYDDNQILWKINSTEEFYIFDYTFPNNENVNVYIKNKNTKTIIYLEKIQNENTKIYDDFVLDHLHCSYTNMFFMPGRNRLPNMSYYE

SEQ ID NO: 19 - protein, 283 aa, Plasmodium yoelii
MILATGNKKRLIYLLIYILFLKESMNVYIKKARYCLRENNNLFYIKNNLFNFLKKGNRSIITHNNKNKNSNNKNSNIENTRIMDFCQVDLDEFCYKQFDKTNKSCSHIPYDKNEFINKVNELIKEKKIKVVGGYASFCKHIFIENFTDATIEAIEINNKNRGLIKTDYISRRDTELPVLIRWISKKDIKENVKAKYLDLILYSREQIEKENKETNHIPKEKSTCLYSIISIKPQNEDYELPMTPITMLRNTLITEGGSGISLDREKYLESVKYWRNHVSIFDN

SEQ ID NO: 20 - protein, 499 aa, Plasmodium yoelii
MEENMNTCFSFDMLDIMISNSSYRKENEKLIWDENKSNDISKSTKDQSLYNTFDNSEQIKEDRDKSVSTQNKKKKSLNISEKSNIDNEFYDDIDNIMDNEINEFVDADLNTFLNLVTNEKKKKKGKESHRKINGTKKNSPLKVQKGKKKKINNNNNDSNKKRKNNQTSSYEISEGEDLLDMFSLHDEGIKDNFSERNYNTNVENSYIDGIEYAICNENEIVSNNTSKNYENINEYNLLSEGGISNSDSSDNCEIKEDISTNNKINIKKSEEKSEEKSEEKSEEKSEEKSEEKSEEKSEEKSEEKSEEKSEEKSEEKSEEKSEEKSEEKSEEKSEEKNINNKLEDIERLDKYLLEPSCIGCSNCNYYLKELTLKNYIKFSSMGEYINEGENNLLFLKNKQIQELENVNKKIIKQMELFKEENINLNKKLADFKFEFIEINKKINMLISQNKLLQDINNDLTKNLQKEKQKKNLQSNNYSVGKKKVSEKDFENSIDKELFN

SEQ ID NO: 21 - protein, 1140 aa, Plasmodium yoelii
MKLKKKTPKNTKHAKHAKHTKKNYGNAKHTKKNYEKGSISKRSYKTGSKANNKLDKKRINKLNKNSEPNSKKKYSWLFDKTAKKNEKKSGKKNGKKSDSDEDVEKSDSGSGSGSDSGGGEPKKETKKKFVLYKNRKKKGKVVLSCFQNLGLSKQMCKSISANLKYNRPTNIQKLCIPKILNKKDVICVSETGSGKSLVYLSTLIDILKDHNKFFGIRGLVILPTKELVIQIYKLAKKICTNYFNLKINIIIGGISLCKQFEILKENIDILICTPGRFSYILDETKLNLEKVEIIVIDEADRLLELNYYNDMNNIYKCIGNKNLNKQTILVSATLPTNVENYFKLKLNNPEIVFINSDHNISSQVNLHFLFCRSYEKYAILIKLILLFKKQKLGKTIIFFCTKYHILFFSKILNFLKIKHSILYGNSDTSFRFNQINNFTKNEDIQFLLVTDLASRGINITSVQNVINYNLPFSPKIFLHRIGRACRVDNQSGYGVSIVTYQDILYAYEICFFIGKKLKFIKKDASNSFPRLGAEPDQNLEKNLEKNLDKNLDQNLEKDMEKKLDQKLDADTNTLKAEMEATKNGKKNSVYLGAIHNISDHLELIDHVKKIDSELITLNKSIEMSYKLYYSMRPKVSKYSSTKFIKKIKKIGGIYKLCLLTHPNPIYDASEKEEANEEEAEKGEAEKGEAEKGEAKKGETKNKNDQVMNEIDNVFENLTNYLKNNANSQKSEQNISDSGNSDRINTSPENQLTNESNLEAYVDANMNQQTSQDFPQNYVESFLHEFQYKSNTKLKNISEEIKEKLNRLKEKIKKNKNIKNNYMSNDINGLLETITLGLNNEEIQKWENEELEYNNNFDKTNMLDEKKKKKLSKRAQKKLEKKNTNQLDDIQKKKDISLDEILKKINDKKMKRDSNNKLLELNAPGFDLPPDEEEELNKQRFVKKQIWDKRKNKFVLTEIDQFQDKKINKKIDPKSTSDKNTTSIYQKWVKRTKNRIKNVGELEDNYDNKKRNKIKEIYIENQKNYEEDVKQTNLKVLKETHPEITEALSKNIKLTKKQQRIYKKYITGKYNNQDTNELKTLNQIQHDKKIQLKKRLKTDRNFRAKYSQMMKKKHQRKLEEMKNLKSARSRSLAIVRKKIKK

SEQ ID NO: 22 - protein, 967 aa, Plasmodium yoelii
MFFFKRNKSNVPEEENEKENANENKNKTNAVVVNNPFQNIQKSSFEEKKESNNEILSDEENLNNSGKNDNKEEKTSSPINENDSSNNNKNGSSNNKNGSSNNKNGSSNNKNGSSSSTEQEQKEKATTHKEENNKDLAKERIYQNLHISGLKKKTINLYSSSSDDDSEDSDKKIVINKPQNKNSNLNKSDKYNNKKEKEHKIDEDNKNKNENKRIFANISSNKEKLVFLTKKERNENKKKLENKNETIKNGEDNYSDEHDDNYKKNKKSDDIRNDRKKQKKRNREHSQSDEDKKMSSNDNTPELNKKDENKKDENKKLYQMSYEKTQSSLAELNMLHIDDIERDKYRERELEIIKQQYLGLNKHKKKMQKPSEKFRNIFNFEWDKSEDTSKNDSNPLYQNRLEPQLLFGRGYIAGIDVREQRKKHNFYDKLVQNRIQLCMKKKKEYEASGEKKWGKNESDKEYNENEDKIIGSNLTKYVSNLENNGLHKNQFIYEPKINNIIKDTDNKHWSEKKREDMTDRDWRIFREDNEIYIKGGVVPPPIRKWEESNLSSDLLKAIKKAKYEKPTPIQMQAIPIALEMRDLIGIAETGSGKTAAFVLPMLSYVKQLPPLTYETSQDGPYALIIAPSRELAIQIYDETNKFASYCSCRTVAVVGGRNAEAQAFELRRGVEIVIGTPGRLQDCLEKAYTVLNQCNYVIIDEADRMMDMGFEDAVHFILDNIPTSNLKSEDDALALQEEMMAKAGHRLYRLTQMFSATMPPSVERLSRKYLRAPAYISIGDPGAGKRSIEQKLEFITEGKKKQKLQELLEIYEPPIIVFVNQKKVADIIAKSISKMKFRAIALHGGKVQEMREEALNAFKNGEFDILVATDVAGRGIDVHGVKLVINFDLPKDIASYTHRIGRTGRAGMKGLAISFVTEQDTHLFYDLRQFLISSNNIVPLELANNPASQVKPGTVMQTSKKQILYKN

SEQ ID NO: 23 - protein, 335 aa, Plasmodium yoelii
MNNILIKNKKSPIFFSVLKIRERRTFYASKWIRRLQILNEKYNYKIEKEEEIEYEEKKNDDKIEKIYPLWNSRRTGLLGYKVGCMSLWDIWGVKHAVTVVKIDNCYVLNQKNITKNGYEALEVGIGNMNVIKQSKNNIGNYIKRRLGFIHKIREFKCTSDCFLPVQHKFSARHFSPGQNLFISSSIKNKGFCGAMKKWNFSGKNKSHGTESKAHRSLGSVSMGKTINIVFRNKKMNTHIGEKSLVKCSNNKLFRINSLKNLLFIKGSIGGYKNKVIKISDAKGRAFNKFKNKIYLYYPTFIYKKNKKYKNVIDMPHSIEDPFLYNEIPLYEPENK

SEQ ID NO: 24 - protein, 603 aa, Plasmodium yoelii
MNDDEIVNKHRNFFNNKFYNTNEKKNNVNHGKINGEKFNYANQINKGQSFEGENISEYNCQRNKTIINSKYRNNQINGMENDSQQLYNNNYLENYFTCYNNNVENENQDLFSNKNNMNIKKRMTVYPSYKNNAYINNKTGYVNKNAFSNVQNGSLNNNAYMQHNFKMNANFDSGPIPPNYIMKQEYINWNGNNMTTNHDQNKNKNRKIIGNNYNNFRETNSNIYNNFYDHNLQQNNKIYVPSQPNNVSTYKNNLINGETNYKLNVNSSLNAGNVNNNSNHNNTNYNNNISSNNYNYSNSNSNSNSNSNSHNKSGHYANTINYMGNKKINKKGHTHKKNNNFLNNHTSVKKDIKKVDNDLESKKSGNKIESKNIYCKYCNIEVNEKELEEHNKLEHIKCPIDNCGEIYNIDLFDIHLLSHEKNEKNENILESKEEIQKWIEERKKNYPTKKKIMEMKNNNINSEEKEKKNKQKKITSLIEKLLVEKYSSAIGRNIYYQTQSQKKSIFVPLLNKLIENNYKNVYENTYYSISDKYNQKNIKFNKKIKKNNLIDSLNVHKNAPLIYQLMKNDIYVYEQKLMQCIEFIVNNNFFDNTFDANQDIVEL

SEQ ID NO: 25 - protein, 548 aa, Plasmodium yoelii
MLRINKDFGKKLVNAVTRKRKPWLEKSCLSFSTKISPVEISKILEKKFENFDFKTSANEVGYVLSVGDGICRAFGLNNVKSSELVEIHNEEDKSNITYGMATNLEYDNVGIVIFGNDRNIKEGDIIKRTNRIIDVNVGYELLGRVVDALGNEIDGEKKIETKERRKIEVKAPGIIARKSVNESIITGIKCIDSLVPIGRGQRELIIGDRQTGKTAIAIDAIIHQKNINDKVPDNEKVYCVYVAIGQKKSNIAKLVNLLKKYDALKYTIIVNSSASDASPLQFLAPYTGCAMAEFFRDRGNHALIIYDDLSKQAVAYRQLSLLLRRPPGREAYPGDIFYIHSKLLERSSKLNDSLKGGSLTALPVIETLNNDVSAYIPTNVISITDGQIFLESELFYKGIIPAINVGLSVSRIGSSAQYKCMKKLASSMKLELAQFREIVAFSQFGSDLDASTKKLIEKGKILTEILKQKQYSPVNISYQICLIYAATKDYLANLNINQVQEFETQYFEYLDANYSDTLKKIQENCDLSEVEDQIKDSIQKFLEIFKKE

SEQ ID NO: 26 - protein, 135 aa, Plasmodium yoelii
MKNYFILNIKRTYRHYSRKKNINNINGKINDPYSDLYKLNYYGNSFKKLPNKKTKSSEYDLIRTSNNTFTYSSPYPPNINYTLKPFPDSAKNFYYENRNYVMRYKNVEYIPIKRLAYKNASKKTNWETYYMRIQK

SEQ ID NO: 27 - protein, 78 aa, Plasmodium yoelii
MICLVNSDNERDLNLLISGEYAISFIGGLVLTFLRSYCLINWFTFCSFAVCFSHLRHASLLIRMYSLYLMLLRGTMCV

SEQ ID NO: 28 - protein, 58 aa, Plasmodium yoelii
MYIKIIKYNILIFHILLILIVTWLILPVVICLSQRLSHASESIYTIIVETANGSLKQL

SEQ ID NO: 29 - protein, 2236 aa, Plasmodium yoelii
MKKKKVVKLKDEYVPKGNYISKDALLTNIFLETNENEITKIESQNSHIVTNCISKLQKKNIQTKLKGLNDLLSHLNKCNEDELNNVFPSFVNIYKKLIFHPNCNIRESLNVCLQLFINRINKKIKRHLQTFFPPLFVSTFDYNKNVNCISKEILTLMFPKNVEVKNDEVKNDEVKNDEVKNDEVKNDGEKNANKIRMQEENKLYKNIKSLNVNITNLYNCLKYIKEDIEETVTSNLNSTAHNEDYDSTVYLFNVLSFFPSFIYILVKSIKNDSETEKKNNSVLKDKIKNEFSCFNNMFQIFFRHLNSIYKNSNQNLKLRKIIYLSIYNIIYILKKKKINYFDINYESNTTIYNYICCILSDKEEYIFKNINHILLMYFYSDNIKLINTNFLRSYLSLVKQNRVYQNDIFNFNIPLFIYIFQKEYIQQNFFFFFFIFYFLLLNKKKSSLIIYYDILLYLCDLFSPFSQADSKADSKTLPNANDKTTGQSSDHGQCKATNRELEACECCNVLRRNIFILPIEIVLIQKGFSNYSYCFKNMYIYDMLENSYYCYDVKNLKKTEKNKNNDNKKKKKLKDLRNNIEKEIIDENYFIDTFTHFIRSFENLSNSLLLDVIDMLDFYISKLCEIKNSELEKSSGNEQYGYIYNDGISFIFKLLLKLKDLIFPKDNKHIDINKLNNTQERLINTFKNLFDSIFKLIELKNYKIIPNLENNFFILQFICNYVDDKNEYFTNLIKILTNFENIICSENIEKNTYFSLIRVCLNFIYLCFEEGIKDHHILASDFIKMLVDTPSNKDDVEMKLKVCIELISFLKNKNKKFINIEKTVLSIYIEYISISQNLEDNKNSDDNIINSFYTALYNIDVSKNKILFGNIFYNNILYIYKNRIMKNNIFCEDNFIDFFFQIFEKKKFNVFKYGINNFGLIENEPDYNKLNNLYLYFLLNIYLKINKKNIETYCINLFSHFKKETIYSCLIVMKNIFKFLTDSEYNNIVNFSNSEINDSEINSDKSYERSDLSNISDHTSYNSNTILNHKTITIDSQTCHITVCIASGMATCESENISNFANVDKFENISKIDKIDKIDKIDNFGQLGEDEDMRMRLEMQRSDVLSNIYINRFIELYKLYNNIESLTICDIKNITYLLYNEEIRKCLNYSNVEIVENMTNLDTFYYFIYQNIEDEEFVFFLLSLKEELEKYQINKCSKFESFFIIYYYYFKKKGKQTYIKNVNTQDITVSDIIYIIKIVKNYQILNICKFLLKRIKRKTEDVIDKTGDTFLETISNELVNLKANNLYQLKIKLFLFKNCVVNYIKEYNYCVESKEATTNRDKKNDAELYDDKNDAELYDKKNDAELYDDKINKIKIFFPEKLHAYIDKNLNLKLCEKNEIGTLNLLYHLICITKHVNNSSLINFQLIKNLTKNIKYLSIKNYDIFFYALYLISSKDEEIDMNYSEIKNSKLEKLYKNGQEVDETNEAMIKGCLNNYLSFLNGHYRKIWNNQINFYKKKIKNLDSVLGNKLKEDDNKFKKNKSGKIKKIKVNNNSSIKLIDTIFGQNKIGLYFLKFVILLIMKKEKYQIIQDETIIKNIIKLVYFILSINQCRNLFIHKKIKLISIHILKLLFKNYSQYLKGNKKIYFLSVDLGINNYKHIFNESLLFFDKIIENDITSQMLQTIKGKIFEIFDLYINTFYLYILVLNIDKYKKNKIFINRIMSIILLNIVLVKEFDKIKKNNPKKFEILNAYLCIDRNCQNEFLYSFFDSNVEQYEQLIIKKMSHESGSESGSKSGSESGRSANWEEQVISGTQLYIHKTEDDFFSENNYVNSAKIVNSLKQKQNEKKNEKKKQNEISITQSSNEPNVSQNCSRNQNCRSVGDVEKREPEQGLEGLESLESLKNCQNFQHWQHCQNFQHWQHCESGPGGFGKKGKKANPLFLLKSGIVNPFLMIDIDKSTLDLYTFLLKRNYLNILLFLINICLSSEYFIYDFELYKNFLIYLEEHDIGIYNFLEKFEGIDKISCMYNDSDKKYDLKFIKKNEKKLYIFLLSINLLLELISVYPTESIMIINENKLLEIKNINELYLSNLIINSQINELENISKNYISTTYYYDKFHKTLTFKFKITEDDDSQNFEGVTAKLSLSFMPNYPFSVLVINDKIESLDKRAPIHNSIKSMYKYARIGNINEIFIKFDSLMNSYFQNKSHCNICFMILYDKKTCDKVCSKCNTSYHSHCLYKWFLTSHNTKCPSCQIQFS

SEQ ID NO: 30 - protein, 1401 aa, Plasmodium yoelii
MKTSIISKNLINKFTHFHNNLGLIFLLKKKERAINYLLYIKSNSFSNVNLTKKKEANIHIIYNNEDSVKCYNNKNECKKNDELDKNNEIISFYKSEKLKNEKKKKKCNNYENEQDKLIYVENDEKKKKKKNINDEKINVKKLKTEEIQIEKDYISKNCLQNEIKTELEILVEKIKNLDEKYKNKIIKYINTLNKEHINGIEQNIIFFFENLDDYLSANGLLICDVGGEEIFSYIKKVNVKIDKNEKNDHMNINNLFDINWIKEKKKLIYGDNIYPIVQNDNENKDIIQTDPKNNPQTDHQKNVENFTNLITHNQNSNCEKNVKDNIINIRRQVLIERSSYKKAIEEAEEFVSNLHDLKKVTEIQGLCKIYLNWVNELEKKIINYKENIKKNNYKKNIFPDLIEEKLLAIITVKWTIQYTFNPLKKKYSNEVTTQSKHFEQEYPYQSLFTHIAIKIGEEVNNELNFQLLEKNNLLYNFIKKNKSNVSFSHFQKYKMLNEIKEKLYMENKNQTNKSDIEIDDTNETTQSIENKKNYQNSQNYQNYQNYQNSQKITNDNNNFLNKPFELVQWNSMKKASIGGLLLKMLIDHAKIDVDINTAKDEYRNEYKYYLFLHKTAKTKGEDLYSDCKYKKELNYQEYYEHESNSLKFIIRDKWKKGNELANFLDSTSQNENEEKKKKKKKCTHKQIAITNVSNGEFGNNNQEVMEEKNMTCSGEIDSKGVNINNCNVEQVCETEKEENVENGEKKTKQNNFCKNQKEKLKNKEIILYRSRRDKNKIEIPVFVHSYIWKNNNWYGVIHMRESCANFLLNNAINSHVPLNYLPMICKPKKWENDQGGMLLLKNNFIRYNIKPLFNLNVCDMSRIKNIVSEIGNVGWKVNKEILHYIEYAYMNGKTIGKIPLNKNYNLPNNIDLKNNNNNNEEIKKYYLLKEEITRLNKCLISERPTFLQKLAVAKTFKKNEQIYFPHNIDFRGRMYPLSPHLHHMGDDICRSLIVFSNGEEIGPNGLYWLKVHLANNFGKDKLNFKKRIEWVDQNINNIKKLKENPFENLEFWGLADNPWQALAVSIDLINALNSSNPSKYKSNIPIQQDGTCNGLQHYAALGKDKDGGRAVNILPSDEPQDIYTVVLDIVINKIKNDIDNGDNKNENTNILTKSELANYCFKYNLLKRKVVKQTIMTICYGVTSIGAKNQVKGKIQNMIAKDTDKNTINELSRYIANYIFESISEIFKRAMIIKKWFNNLSKITNDLNIPITWISPIGLPCEQPYRLGTRILVNTPLQSVSVTSYKNSLIHKNKQRLGFPPNFVHSLDASHLIMTAEKMLIQNNFSFAAVHDSYWTHACNVDIMNKFIRDSFVTLYNKPILENIYQNFQMRLGKFAEKIPPPPEQGHLDISLVRHSQYFFS

SEQ ID NO: 31 - protein, 1060 aa, Plasmodium yoelii
MRLSLNLYYFALMHVFTNSFLTYNSFININLFLFDTNLEYINIIKTGIPVFVKQDLLINRKLFSNNDNWDINDNTDNSVNEISTTRINVRKETEIYNINCKNINDEKCGIHAEGNQCMKKNNNCITTLKLKTDKTPNEEAQISDNKIIDTDNTQIKKYVDSDKNIIKEKNEEKIMRKNDENVEMCKINNNENSGVELDTNKNMFDVRSNENCENYENCENCENVSTQKYTQIDDEILKIMDKKNILVIINEEDENKSFHEEDDKEDDEEDDEEDDDELINKHLNEIENIINELSSKNYEQNKSTNSGDSDITDNTSNNLDDINEDEYEFVEGVCELDDINNVYVRYKNDLENYRNKLKENKLDEYYSDIIKSRNLININYENEYMLKMKYHKDYNFPLHNLHIVNEKYIKNNLYNNFVLLNDENNNVSFQEINYYANLSKIDIRPTMFKEFYLKFSLCNGKYLPLGSSFVERVCFLSYHLKQNPHLNKIKITKSKFILYHLFLNVIKAFKILSINKCVKHIKESNLLYIIFILNEEIIKESENEVNIGKCLNNIIERNKEWYEILNFIFTIMFGCSSYLKEHYSLTEEEKNNIFFKDNILDLPIFEYFNKNVIDIFIPRNIELKINIDLFKDISNSSDKNLKLYQTWYFCYLFIHKVYLLNKMWNIIKKWETSNFVPNPWYIDHIGSVLVPHIISLRHIQQNDQKFFRYIDELQMFVSFKRSKKYSIPNYDKNEFHLVEHIVAFQGTSSPFIWLFNLIYELTPYPFLTKGKVHKAYLYIFKKAVKPYLHILKKKILNEIKNTKSKYSKENPYVIIFTGHSFGASMANMSSLYLENILREQGVKTKVNNNIDDIGNDDNDHNSVYIKIYSITFGMPIFYDDKYYEDFEKSAVISNNINVNYDPIPVTMAIPILNGFRDPEENKKFNIIFKVEDLKKLNYDFGNIIFDGDELFNNEKNQPRSITFLFMKYFFKDNIFFELCEQHIYQTHYFFYFVFLTLLSRWANEAKWGTYFLIPFFIFDILSFSHKNVMFMLKENYKKYKKLVLKKTQSIEKQEKKQVAN

SEQ ID NO: 32 - protein, 319 aa, Plasmodium yoelii
MKISLSFNKKKKKEEENETKEAKKEQKNNNNFQDNKKGINERDKIKNVFHSSSDEEVFDFENNHNKKIAEKKKKEIENEIKEYIYEHENVPVQENKNEKDKKNREKPKKEIQYLGYKGEELTKFHSDKLKEDVKKNYHSISSKDEYNKSITSKETDNDIKKKRYGPNFKKMNTGSYKDYNREKNYDKIKNKKNDDDLNIDEIFTKKENNDNNNNNNNKSKYMDALINSSKRRMMEKEILMQKKLKIDTEKDKVFVTNAYKKKMAERQLIKQDIEEENENVESSNQTSLNFNLFLKNINAPSNYNRNNRLYNENQNLEDF

SEQ ID NO: 33 - protein, 48 aa, Plasmodium yoelii
MFLLKNETEESPKEILINELKYKIRILSGIVFVIRAIPTVLNLFNQKE

SEQ ID NO: 34 - protein, 387 aa, Plasmodium yoelii
MIYYQFFIIPFWQYVIIIYRHVVYIDLYIIYAKNVCCIPKKMSETSTCPLNNFFEIDDENDLDELKPKDTDLYRESFLTYIYKQFEFCCTNFFDEFEEKKKIKNNTKRNYLQDYIKKNKVSEFNVFDKIIKRNEDIINEVPLDSKYFSPHADWCECAHELDIELKEKEVEFCIFNFFLKMYRSEPRDKDLILSTILECLDNKKNFKKKYNAMKSKMNFLKEIKSIETSNFKETINELINTIESTDFIHVNDNENFYFKLYIIIKIKYQYGIYIFNCDETYDIIVIDFNTYNDNKPKILSFFTLRKFISFLNSIHSIHFSDKNVHDSFPIFFYESKECYTLSHKHLSLKSYINKIQRTKFETSNISSDHESVETYKNQDSYVSETKQN

SEQ ID NO: 35 - protein, 670 aa, Plasmodium yoelii
MVGVLRLKGSNHISHLEEHNKNDHTNYHINDHTNYHTNYHTNYHINYHINYHANGHQQISPSKDIRVGNKKKKRKKSSNCVESNRNKIIEMTQNEDKMNYDNIKYSDLKKKKKKKKNFSKIFVKTINMLFKEIFVKSFQTMLSYAITSSFFILLNVYMSNSCKYEKMAGFGISLSIISLLNSVVEGFCSSLNYFCSQSIGMKCIYNSFLFLNRAYFLFFIFYILLIFIFFLIKFLIYYAIDLKYINIFMDNNVTQIYYYKIMIVFFSSFKILLFSFYPYFLFESTRRFLILHNNIYPSLFTSFLSFCVLNFLCYIFVFIFSMTHFGVSLAWLITNIISCFFILYFLRNYIQECSLLLELDVRTPFLSPKCKSEENIIEPIFTCSINNIDAHQYIQNKNEHYHILDIEKKTNLNKNDVNIFLSKNQVCKIIFLFFHIPSKNIRNKFLNITKTNIKNIFFEILSFEMQLLESAYLNLTSVAVFIQINNMMGLVYNVSHSYGIFLAKLMGIYISRKKRIQENSPKNNKNLSDFIDTNIESIFLDKIQLAISFILLLLFLYISLAIIYIYHEQIITFFYTNIEIRNYLIKNFFIITIQFLLEVLAAFLNNIIKGMGLQDKISFFTFINFMLLMQPLGLILTFFFSLDIYGFVYSTIISMTIQICYLSAFIFKAL

SEQ ID NO: 36 - protein, 741 aa, Plasmodium yoelii
MEGYGNTENINDHGNNEYSISGNVQENCEFENGVNQNMENELNDNLLNNNDGRNKKKKNKYERNIFKNKKNNNNNDNNGDENGTVPYRSFNDNDMDIKEDEDDKNGERDENGEHNYKLTNKNGEKNNNKKNKSNNQKFSEVYNSIYEDLKKKKSGIKQKNGNNNEDNNINNYDKKNNFYEMNYYSDNANSISSSIDGDSFFNDKVLKKYIVGQIFNIIRTSFQWAISPFILFFLFEHYSIFYVYRIISFFILLLFTPITLYLINKQNIKFFLLATNTTRTILWGICIPILYSLYKDYIKKYYIDSSFEFLFCILIIVDHMCINLSSIVDMDNNGIEYISKKYDIIITEKANRKYLTLHQFFFDVSFTIFNPLIIFVMYLFARFFSQEYHRDLFVYLTSIYFAFISIVSLIMYAIGLERTESSSKRGEKINDNNYKFQNNLNNVEEGNIKDNEINENDFDKYYEKNNNNNNKSDQYVNNYTNAYPSVYVMQNQVHSFNDNYDPYSNKEIITLKDQYKTHFKNIKINLKHISNDYKLLFYLSSLSFLNSVEDITMLMLIPFTSIFACEFFYVESLFIKVLIAIILISLVKCFENISYYCNKKKLVTLKEPSMGMFLSGFSLLIYFFPFLLIRYLNIYIFLIFYTICSFLYFFFSTNLKSTLSISFQKHIKESKYDICNFTGIFMSFFNSIFVIFVIMLLSIVNHFVANYISICIFFIIILFILCKCGSLILKEDDDSASTKIV

SEQ ID NO: 37 - protein, 304 aa, Plasmodium yoelii
MFTFSSFQKLLFGVTVSSGGIVLSCFYIYKKNRPLNDYNVDAPSEKFRIKVFDDLAKNYDEKNDFVEKITSIAKYKKKNFRKVRGVVLEIGAGTGRNLNFLKNIDALVCVEKSEKMCEQLKKKIEKINPPYPVYVINNDIKNNYFKPDTFDSVISSFSLCSLEHVDECLQQVHEVMKHDGKFFLVERGIIYNKFIRYILERFDLYPNRKIPWEYGYYENRSPLDILKNNGFNITFKLIKNAGSIYILIAKKIKRLPNKTVNENNQIHTNQSVDKDKSKKKEIHINEILLEKDKVPIYYIHRNDS

SEQ ID NO: 38 - protein, 145 aa, Plasmodium yoelii
MNKKLYSLFFLIYLIVLYCATVQGNKDDNGKNDRHGKNIIKKNYNKNNKQMKGTNEDHTEDNEEFDENYEDNKESMRLINKKEKKESEANKLSKIKKAYAFGITTVIALNILFLLKNYINNNLADPNGHIPKLINKAIAIKNKKS

SEQ ID NO: 39 - protein, 138 aa, Plasmodium yoelii
MNTKLYSLFVFICLIIVYCATVQGSKDNGKNGVYELKMIKKKHKKNNKDNKHVQRAGEDEDEDDNIDYTNLVKEEEKRNEEVKRLSKMHKAYTLGMSTIIFLSTLFLIRDCVLESISRPDSYISQFIKKRIDNKYKKA

SEQ ID NO: 40 - protein, 1086 aa, Plasmodium falciparum
MFRIFFTLLIIILIKKTSAIDLIEGIFYEKNEIDKLTFSLDHRVRDNLKTDLILNNNGENDYAYLNKYVYTILNRDSTEKIKTFFSHNKDMKSCDYFISKEYNSSDKTNQICYKKTFCGVVIPNSEEIKTNKITNDKLYCAHFNSTHIIIYYISQPLLLEPHVVYEETFFEKGKNDQINCQGMYISLRSVHVHTHNAILQQETLTYIKNLCDGKNNCKFDFDSIKYENKSLTHYLFFINIQYQCISPLNLQENEMCDVYNDDTHKATCKYGFNKIELLKNVCEENYRCTQDICSVNQFCDGENETCTCKTSLLPSAKNNCEYNDLCTVLNCPENSTCEQIGNGKKAECKCENGKYYHNNKCYTKNDLELAIKIEPHKKEKFYKNNLYQGKALKPEYIFMQCENGFSIEVINAYVSCYRVSFNLNKLKYVTESLKKMCDGKTKCAYGNTIDPIDDLNHHNICNNFNTIFKYDYLCVFNNQNITSDKNSHLHSNIPSLYNSSILPDINKSKFHLISRNSRTNQYPHNNISMLEIQNEISSHNSNQFSTDPHTNSNNINNMNIKKVEIFRSRFSSKLQCQGGKINIDKAILKGGEGCNDLLLTNSLKSYCNDLSECDIGLIYHFDTYCINDQYLFVSYSCSNLCNKCHNNSTCYGNRFNYDCFCDNPYISKYGNKLCERPNDCESVLCSQNQVCQILPNDKLICQCEEGYKNVKGKCVPDNKCDLSCPSNKVCVIENGKQTCKCSERFVLENGVCICANDYKMEDGINCIAKNKCKRKEYENICTNPNEMCAYNEETDIVKCECKEHYYRSSRGECILNDYCKDINCKENEECSIVNFKPECVCKENLKKNNKGECIYENSCLINEGNCPKDSKCIYREYKPHECVCNKQGHVAVNGKCVLEDKCVHNKKCSENSICVNVMNKEPICVCTYNYYKKDGVCLIQNPCLKDNGGCSRNSECTFKYSKINCTCKENYKNKDDSCVPNTNEYDESFTFQYNDDASIILGACGMIEFSYIYNQIIWKINNSKESYVFYYDYPTAGNIEVQIKNEIFHTIIYLKKKIGNSVIYDDFQVDHQTCIYENVFYYSNQN

SEQ ID NO: 41 - protein, 277 aa, Plasmodium falciparum
MVSIFSLLTYIIYLYFSLKSIDMCCIEHIDRSKNIIFFGIINKCLFLNNKRVFFLNKRRNIITYKKDIRLETLKMDDFCEVDLDEFCYKQFDEKNKSCSYIPYDKEKFVIKVNELIKERKIKVLPGYADFCKHIFIENFTEATVETMEINNKNRDLIKTDYISRRDNELPVLVRWLCKKDIKDQITKAKYLDLILYSKDQIDKENKEMKNKPKNISHCDYSIICIKAQNENYELPMTPITMLRNTLITEGGSGVHLNREKYLDSVKYWRHHVSIIDN

SEQ ID NO: 42 - protein, 274 aa, Plasmodium falciparum
MLEAKLNNASILKKLFECIKDLVNDANVDADESGLKLQALDGNHVSLVSLHLLDSGFSHYRCDRERVLGVNIASLNKVFKLCGANESVVISSKDDEDNLNFVFENNKEDKVTNFSLKLMSIELDSLNIPDCEEGFDAEVELSSKELTNIFRNLSEFSDTVFIEIDSNCIKFTTKGIVGDAEVALKPRDSTSEDDIGVTIKSKKKIKQSFAIKYLNLFSKSNILADVVVLGLSDSRPIEFKYEIKDTSPDSDTLKIGFVKFFLAPKMDDDMDNKD

SEQ ID NO: 43 - protein, 409 aa, Plasmodium falciparum
MWNLINYNNENDSNANATFWSIFGYEDKPNENISINENEQKENNLKVEKNIEPELLDENTNKDIRRKKKKKKNKLKDNIDKSPFLSDISAYADYCTSDDVTDKYSLNENNDQMISSESNRRNYSNDISEKDDLTIQEEKEIIIEKENDLTVQEENDITIQEEKELIGEKYNDMTVQEEKELIDEKENDLTVQENKTERMVEENYNNSSLPYANEWLFDKIKEILDPSINQESISELLTHKYNSFNEANTGIFDLLENLLVRSGSNNQENMEISKQKKGNYSYNHYNSMDESINEHYNFINYSIHCINKELSANVELEATKMMKIYNHSLNKYKNLINFKDDIYQDLVNEGEEISTLIFDENKKIKKRIPKIDFLVLININSDNYNNIIESHNVQTPKLNLEEIFKINLI

SEQ ID NO: 44 - protein, 385 aa, Plasmodium falciparum
MENGGGSFSFDMLDMINSNYTSKSGKKNNKKNKEDKDDNIHLRNIVKDMKDNLIEDIDDFNNNNSTIFGENKEVNKLYEKKKKKRKKNFDNSNENVNRKVSNKETKKEQNKINDNQNKLGYISYDKKNNIINDEDMSINSNSDSFLFLTDNEYQKINEKDNYNDNNKSILLYKENYDKNEISQKNDLSNNDDNLNYFLYNKKFSNYHDDNFINSKINEMDILDKQLISKTSFPPYECTNCNILLKEITTRNYLNFSTLNEYINQSEHNLLLLKNKKIDQLEKVNKNIMNKMKQLKKENTLLIDKLKYFQTNFNQLDINLNKLIEENKILKSINDDLEKKVHMNEALSSNDEQKNKIIRKKKKERAKGKGKELFENSIDKDIFSDT

SEQ ID NO: 45 - protein, 229 aa, Plasmodium falciparum
MDYEVEGEVPRTDENYIFLYLPIVLNEMIKMNNRGVGKITSFHASKVPDISLKNYTERIGKYIGCSNECFVLLIIYLDRLIKIHKDISLSLLCIHRLVITAAMISVKFFDDLYYSNSYYAKIGGVTTKELNKLEIYFLNLIDYKLFVSSQEYDFYRKYICLAVQKYIYNKNNIKHIPIIKKPYNLFNYKSSNNSTLMFQPNNNNMNIVNFAATNQNKKNNSQKDQHGNK

SEQ ID NO: 46 - protein, 1529 aa, Plasmodium falciparum
MIKYRLFNICIFLLFILFNYFCCALRSYKKYKVTTFIGSTPQKPVHLFNSRVVKKNIFLWYIKKKGGDICKSVNSFNLFEKKNNNNNNDYNDDDDNNNDDNNNNNNDNDDNDNEDDITYEEIEEYLKKNKVEDYEEDEGKSEILKLINYIPTLSNEEEFFSRFGYINREKKSMEYYFNQMKNEKERKQKKNYNILNFILSYYLKKKIFNDVHSNKNYDSIQSYCYYINNLINHKDTSLEWRNGNLSKKNNIFSNKWLCSFISFYLKNVNALKYISFGCVSAGLTFMLKYILRNIRIDNIFLLKNHFNLIYGLRNMKIYKIVLFCLFINVLFINKYNQYFSITDDGFAVLFSNYFFYEGIEHLNKKKIYQFMNKYNYTLNDILYSLNDMFIYFLNKKIYVDEIFDPDIVIYIDSFISLYQKLFKTNKENIKNILTMILNKYHISNVKNENKNKDLLSRIFYIFYIINIKFKYDVIQAHKLNLLRGENKYMIPFFFKNNNISNYFLLSHISDHLNVKEKIINNYLLEKMKNDYENYVLSLLRTKTYSNSVYDDIKNMLFITLHSSVIDDVNVSIFMNLVKDIISNVDYECKYTSRSNRKDKIVSEFEMDGNDVLKEKENISSNNNDDDNNEDDNNDDNNDDDNNDDNNDDNNDDNSNDHSNDHSNDHSNDHSNDDNSNLESNEFNENNLEKGFYSNMEESVDYIIHDNNSLKNATKNTGDISTEKIKKNDVILSEKEELKEKEQLMKKLNDIYFLRKYLNIDKEFTDNFLEKYLFKYIYKEYKIFINNLIFKKLKNKNDNLFFLKRGINLPSKTTQNIVKNIILNFVIKTKENIAIFYKLENIDKCLRLIVNLINIYKKIKKKKKFIKFNSNIFNLDHFFSYNCYKENEHTDIIQNDQSSNIINNNDNISQEDHMVNDHGKNKEENENFSSDEEVNLNQPFLKEEEEFIKHNIYKEKLCDENEGKIILNKNDRKKLYEEFVLKYMKNKSERNILKIIFNLDYDNNDIDKEIEDNIIKRFLEDSTKNKLTNLKNLDMQLKIIGNDNLFDYKHLNFNEGLLIKHNFKKSLKDEENKKMSLNEYIIKKEDIFDDIDDESFLEICQKMYINKLFHLKENIYNNRKELYFYQVILNIEKNINEIHDIYLIDQYEKMINDTIKTNILNKNYTNIKNLYLKRIINFLNISEEKASIVELNCIFHQTNNIFKTIKENFYIYRNDSDFIDDINEILTIYKNFDLIKKVIRNNQEMYFVKFSLVESNYNIVHKIFERYVLYVIDVITNENRNMYKDNIFKLRTILNVHETTVNDISTKIYRKYIENQELHSLNNMDSFFNFLFNMSKEEQKNIVIDFLRTKIDTYLKSDENYDEKLHKLYDLLIFINDNLQYKKNIFDLSSLSSKLLYEFLLSCVDNYIHTKKTDAFIKSQADYINHFNNFLSKIKALIRGPEEQYHLSHVLNILKNDIIKRAINLLDKFEYDMCIEEVYNLIKLQMIDENINFSDIDIAKRKKLVNIFSYQNISDEKKFLYMDTLKKILL

SEQ ID NO: 47 - protein, 1212 aa, Plasmodium falciparum
MAIPSLLSCKSNNSSNDDKIEECTNNVYELKNEYIFVYRCNICLLLFTCVYTFAEHIISENHRVKQLDALKKDKYFNCLRCKYICLSVVKMIKHIELYNHGHNILKKIKKKILYTGKASCACKMKCYFFYSQNKNLTNIEKCTLYNDNNIEGYGLNVEDRYVIHDINVEHRVNNMNNEKKETKKKYNNKMYNDDDENDDNDDNDDNDDNDDYDNAFLTYQTNNDYANNVNNNNNNNNGNNNNYYNNSNCKIQEFIMPLDNNDSTLQNKYLSLNNIQNKECIKKYSLPIIMGGSHVATNSYMNFQHHKNDHQEYNSYPHNIDKEQMDINYSYHSVEKINNIHTNVLLKLEETTKNETHKEYMNNILYDQNKNEKRNLLIHMYENNYNFDDNIISNNNKSYIEKDFLSNDEKRINSIQYGIDHFDFNMNKRNTYPTDVASHSLIKNLIPNINNSYSSNINNKMNEVQMDHNINNLHNNKNKYTSCNFVLPGETNDEKNKEEQNRSYNLNKRDYIFHNLIHEENTINNTNNTNNINNINNINNINNINNINNTNNTNNTNNTNNINNTNNINNINYINNTNHQFQNNKREDNSLCLYNDDIEKNSFYQNRHIYFDAIFNSYFLKDILQNGKDKGDNYIDVENYEMKNEDEEIKQFIPVNLNPCFYPNEPNILLKLPHEEKKIAEEMVGYVNKNVDNVNDENDENDENDENDENDENDENDVNDENDENNNDGNYNNNIILNEQPCYNNIEREILMNMNKSFFKGLNKNTKEDIQNLHGKKCSDNMCEETNKEEDIVENMYMKNIYNNILNSNNDENNIQDKSNNTSICDINKNESLSSLHNIKNESENNKYNKMNETNNDYYLNKIGHDVNNFLNILFDKKNEMMNNKNSVVNSMYTSDNKLDITHNNINNNNNNNNNNKNNNNNNNNDKNNNNNNNNNNNNNNNNNSNLFCNYDIQYASIYDNSHLSNEKNNLSYDLNLSSLPSSNMNKNLIYYGKNSNLLNNNTNHTNIQEDINHNDVEGKKEKHSFNLLPHNICHIDKKVDENNGHIISHEQSYNMISQKNVYNNLYHVNTNNEKQKKVIINDQGDNTNIYTSNEYTEANKKRILFVKEINEIKKIIQKETMNSNANNIYFNNNNNINNINNNNINNNNVYNSHVENIINMKPLIYYGKEKILHKGKFKKYYTTPPIPDNNNLYEIRMVQKSNTDTYADNIK

SEQ ID NO: 48 - protein, 1289 aa, Plasmodium falciparum
MKNKKKLFGPSSSNNTKSNKKKINKSKNKSKSKKNEKNEKRINIKKNNGLKKSKEDVSKRKDIDLLQNNKKKNILIKTNKNISKNKNGTKRYQWLFSDKDKKKEKVEESDLNNYSSSCSYDDKKKEKKKFVLYKKKKNKSNNNSNNSNNKKKKKKVILNSFQQLGLSENMCRSIASNLKYNKPTNIQKLCITKILHRRDVICISKTGSGKSLVYLCTLIDILKEHNKYYGIRGLIILPTKELVIQIYKLCKKICKNYFHLNINIIIGGVSIIKQFDILNQNLDILLCTPGRLSFLLQETKLSLEKVEILIIDEADRLLELNYYNDMNVIYKSLNNTSKQTILVSATLPTNVENYFKLKLNNPDVLFLTSDNTINEKVHLHFLFCRSYEKYALLLRLILIFKKKKLGKTMIFFCTKYHILFFSNILKHFKIHHSILYGNSDTSFRFEQINNFTKNEHIQFLLVTDVASRGINITSVQNVINYNLPFSPKLFIHRIGRACRTDISGYGISLLTYQDILYAYEICFFIGKKLKFFKKEKSVLDNDMEDISSKGFTSKGMDIEANTVVNEMSNVTNMNNDNDNKCGDNECGDNKCGDNECGDNKCGDNKCGDNYCGDNYCGDNYCGDNECVDKVYYGDDKNKRDKSYTCSHKNNTNDIVYMGCVPHLNDYIEYIEDLKKRDTELMSLNKSILASYKLYYSMRPKVSKYVSTKCINKINKIGGLYKLSLYNHPHWIYENERCLPEDMRSTNENTTHEFLENEKEMDYTNDCVNNNNNNNNNNNNNNNNNDNNDGDVYMCNDQLNDEVDILFNNLINYISHNNNNNNISNENITNDLVQNEIKSDDQENDTTEIQNNEHYEESNIENVNANYDYSKNKLISIIHNFENKNSNNKIKTISDELKQKLNQLKEKNERYKSRRNYVLSNDVNEFMDTLTYQISDEEDENADIKNIPEMWKKIFLHSQGNNNSTSMNINDPSEHYMENKKKLSKRALKKLKKNENNDSNEFNNNNNINNNDNVNNIKNISFDDVLRIINEKKMKNDMRYNNTSTLDIKNPGFDLPPDETEELNKQRFVKKQIWDKKKRKFVLTEIDTFQTDEFGIKKKVNKNKDDKTNSITNLYEKWVKSTKKRIKNVGELEDENDIIPKTKLNKNKNKNKKGKKNKNQNKYNNDISDNNDNNSENEEKQYNINMLKLMHPEISEALSKNNKLTKKQQRIYKKYISGKYINATTQKDTNTLHNTAKQRKKQLQNRLRTDKKFRTKYLKIKKKKFENKMKRKHNLSSARERSLIILKNKK

SEQ ID NO: 49 - protein, 1123 aa, Plasmodium falciparum
MFFFRKKENNLDEEKENVPQVSNPFQGIEKESIHIKRENKLTNEEDNLYIKRNEQSDDNDDNDNNDDNDNNDDNDDDNNDDNNNDVNNNNVNNNDVNNDDVNNDGEKRNNISYDKNKKNLFNEKNDNIVHSSKYKKDNQTQEDDTSSNKIQSKDKPKQNEKTKFKTSIKLYYNNSGSEEEESNDDDDYNNNKDEKKEKLIKKNITMKNQIVIKEPIKYNKYERSDTKGSVRPKTHYNDNNKNNNFHYARNSYEDIHPNNTKANQKIFANLSNNEKPVFLTKKEREEKKKKMENDKQKKMISSKEKEEEGEGEGEGERKKKKEHHHIRHSCIDNRKHRRTEDSYEYRNDEHRTNDKKRKNEYDHINDDKEYNENVYDEDTYYNDRNNKKFKDYKHNNNNNYDDHNNNTNDTYNKSQTQYILSESYYKKPESSLAELNMLNLSNIQRDNLKEKELEIIKQQYLGLNKTKKKIQKPSEKFRNIFNFEWDQSEDTSRNDSNPLYQNRLEPQLLFGRGYIAGIDVREQRKKNNFYDKLVQNRLNMSLNKDRENQHQQHQQHQQHHHHNNNNNNNISCNDNSDHNSNLNSNLNSNLNSNLNSNLNSNLSSNHISNNNLHNNHHPNEPSSDKHPNTSEYNYHNYLIKNKRGEYIYEPKVNNIIKDVCEKHWSQKSREEMTDRDWRIFREDNEIYIKGGVVPPPIRKWEESNLSNDLLKAIKKAKYEKPTPIQMQAIPIALEMRDLIGIAETGSGKTAAFVLPMLSYVKQLPPLTYETSQDGPYALVIAPSRELAIQIYEETNKFASYCSCRTVAVVGGRNAEAQAFELRRGVEIVIGTPGRLQDCLEKAYTVLNQCNYVILDEADRMMDMGFEDTVHYILDKIPTSNLKSEDDALALQEEMMTKAGHRLYRLTQMFSATMPPSVERLSRKYLRAPAYISIGDPGAGKRSIEQKLEFLTEGKKKQKLQEILEMYEPPIIVFVNQKKVADIISKSITKMKYKAVALHGGKAQEIREQTLSAFKNAEFDILVATDVAGRGIDVHGVKLVINFDMPKDIESYTHRIGRTGRAGMKGLAISFITEHDSHLFYDLKQFLISSNNIVPLELANNPASKVKPGTVMQTPKKNQILYKN

SEQ ID NO: 50 - protein, 1202 aa, Plasmodium falciparum
MCEKSQKSQNSPEQNGDNVELFRKKNIEVTCITNNTTKKYIKKKTNKHLLYNNKEKHINNEESKILSLQKKQKQKKNKKNVYRFDYIKYYERVRKWKEKRYGHDYEKKKTITRQEKELPHHTKNHHQKKKNKIVQKNDINKNITIYKNYIGSNDQIITCEEGYKDVVNCVQQYKHVEKNNKKENKIYQHSYNINNEHYLNNYTPYIEPPNRNNNNNNNNMRGVSIINNIYNNLNNIDILKSSETILLQDQNKINFSNKTIISSFQDMESFQNLNCEDDEDKYNDIDIIPMSNDTHIHHPLMINDLTHFCNKYNYVSLKNKMIFYPYNYDNNKYKRFSLPYFRFTSIGRNGTIQKPKSDEYINKQKKKSKDIDYFKNQYDEKHFDLKKTFVNNYLDENKIKEYHKKKTNLLKKKFIKTSIYKERIDIKKLENNFFQNNSIEYRDNINTPTLQIVNNYGSKDLNMEHINNPTYNNLKYVQHIQQKINKDNNIYKMEHLNKMNDSYNYTHTYHHNKNDNLINNAGNYTYECITPTFIISKNKNKNKKNKNIKKIKNIKKIKNIKNIKNIKNKISNNNNNNIYYYNNYYYNKVNRNIYVNKKKTSQYFKNFKFKGKNLKYMSNNKIFKNVNLDIHKYKRNIYEYKKNKNKKKKNNKIKRLSITPSILPLKNKKKYNFSYDIYKQVDLQNNLLNINKHKKLLHVDEKDLTKNFDIFLCLFMKYEKNESQLLALIHDEDLTKYSYFYQTYIKPILDSYKKCKWEKIKNSNINEQKKNERKDCTHYNNITLNKIVLQIFIPSIKKNYLKYLNILYYKNTNILDIHTSEELLKEIIKIEKQINNRRRKSYENNTNCVSLISNNNYEKKIKLIPKPQWANKYNLKVLLKRQEHFNPFTIFGTSVKEVNLEEIFTLDVYNNYITNDDRYKNKILYELYVGNYIHNLYEKITYDEWNDVLDILKKHWNNFITLECNMILDPLLLEEILWYIDNNKMYKDKSKDMYTYENCFCPTPDPKKEINFNDFKNFSKSMSNKYTFQKINKFKKYSLNEESIYKDDHLLLKYDDVYSRWGVSSNPKKKKNKKSNNHNHNNNNIREYDTIDNNYTYNINCNNFTNNKHTLEKQNMLLHIPRPSSAIYYDINFFQNKVKKNIFTKISKCENTSYWNMLHYNNYSLRRSKSKKWISQNYFDNFFSNYYLYNFGTIEGTYNYTI

SEQ ID NO: 51 - protein, 341 aa, Plasmodium falciparum
MIFSRYPLICGNKKKIEDGFFYFIKNEKKGFYASKWIRRLQLLNEKYNYKIDKEEEEIEYEEKKEDDNIKKVYPLWNSRRSGLLGYKVGCMSIWDVWGVKHAVTVVKIDNCYVINQKTISKNGYEALELGVGNMNVIKQSKNNIGNFIKRKLGFIHKIKEFKCTSDCFLPIHHKFSCRHFSPGQNLFISSGIKNKGFCGAMKKWNFSGKNKSHGTESKAHRSLGSVSMGKTINIVFRNKKMNTHIGEKSLVKCSNNKLFRINSLKNLLFIKGTIGGYKNKVIKISDAKGRSFNKFKNKIFLYYPTFIYKKNKKYKNVIDMPHSVEDPFLYNEIPLYDPPNK

SEQ ID NO: 52 - protein, 852 aa, Plasmodium falciparum
MNNYEKKSNALDKKNSRNEFCEAYKTVEKMQINHYTVENNISTNEGMNIPYNDMYKEENVINQKDYTTTCNNLIYNESDELNGCNKIVEHNNNELKCLNRNKNNEALIISQSSTKYLENYFSSYNNNNNIHNHNNIHNIHNHNNIHNIHNHNNHNIHNIHNNPFCCKHNHMGCMNNHIKCINNQIGCFNHHIGCPNNHGDCNNKHICYYNIHDCNNNILKSEDKEEKQNLCQTFKQNYANNQTMLLSTPHSEGIVDNIHKQNDSEIKNEKNLDHNINLQGNNYTKNNMTHEQDYIYKEDISKNYNIVQNITNSFPSMINKKETDKGNVNNNKNKDKNEQNNEKENNNENEHSNVNGHNNVNEHSNVNEHSNVNEHSNVNKHNNTNVHNNENMWGYFNEGALYNFSSIYNAKQRRPYTNYGNHMKHHQNKMNNDTNNSYYNNNNYNNNNNNIGFIEKNNINKNNRNNKVNFDRGSKHNINFNNKRFNNYNNENKTEYNLNYEHKNKKSVHKYNYSHNNYNNNYYNNNNYKKNNYDKHRLNYNNNNHNNNNLNYSHEQNEESYTLPHSYDNNICNHPRNNIISSNPSTKGLNKQNNNYDKKKMDKANVKVNHNINNNRVINKEKSSNTFFCKYCNVNIEEGKLSDHNKNEHIICPIDDCNKIYNIDDMEVHLLNHMKNEKNEIILNDAKEIEKWISERKKNYPTRNKILNNMNKNESKKKNKPKCLIEELLFERYCSAIGKNLYHKNESEKSIFVPLLSKLSDKNYPNIYENSYYNISSSNNHSDIQKKRNKNPKGKEIIDTLNIHKRTPLIYQLMKNDIYTYEKKLIKSIEYITKNKFFDDSFNKKKKHIEEL

SEQ ID NO: 53 - protein, 551 aa, Plasmodium falciparum
MKASGLCQQLNKCMWNQLVVSRKCIKKFVCNYSTKISPIEISKILEKKFESFNFKTSSNEVGYVLSVGDGICRAYGLNNVKSSELVEIHNEDDKGSVTYGMATNLEYDNVGIVIFGNDRNIKEGDVIKRTNRIIDVNVGYELLGRVVDALGNCIDGEKNVVTKERRKIEIKAPGIIARKSVNESIITGIKCIDSLVPIGRGQRELIIGDRQTGKTAIAIDAIIHQKNINDNVLNNNEKVYCIYVAIGQKKSNIAKLVNLLKKYDALKYTIIVNSSASDASPLQFLAPYTGCAMAEFFRDNGKHALIIFDDLSKQAVAYRQLSLLLRRPPGREAYPGDIFYIHSKLLERSSKLNDNLKGGSLTALPIIETLNNDVSAYIPTNVISITDGQIFLESELFYKGIIPAINVGLSVSRIGSSAQYNCMKKLASSMKLELAQFREIVAFSQFGSDLDVSTKKLIEKGKILTEILKQKQYSPVNISYQICLIYAATKDYLLNLPIEKVQDFETKYFDYLDNNYLDVLKKIQSNCHLSEVEDQIKESIQKFLELYKNEA

SEQ ID NO: 54 - protein, 139 aa, Plasmodium falciparum
MYRNIKYYFLTNWKRTYRHYSRKQNINNLSNKIKDPYSDLYKSSMYGNNFKILPNKKTKSREYEIIKTSNNTYSYTSPYPPNINYTLTPYPESSKKMYYENRKYIMKYKNVEYIPIKRLTYKNASKKTNWNTYYIRMEK

SEQ ID NO: 55 - protein, 1531 aa, Plasmodium falciparum
MFVCKKCSRYVIKKIFYTFICESKYQLLFLRKGNDYKNIFFLEKGYISTHVRGDKKERTQKKKNDLDIKRLFLDKPSTPNIKDEYEKKTNDNNNMEEYNICNNNIITNNNKIKNSSHMNTFNSNRKKVCVKDNINNNTINNNYEEQKENKEEYINTPKAKNNLYNLPYKNKDTHIIDKKKLDEQVVKELHNLIISIKKIDKDKKENIIKYINTLNKKYVKNINKNIIVFFENLDIYMSVNGLLICDIGGEEIFNYINKIKLTNNIDIKKETYNDDIEKHNVNTNERFLHMDDVTKEDNININNMFDINYIKEKKKRIYGDNIYPIVVKSEEKEEVVPKKKKKNSNNIIVHNNNIINNKCGDYNIINCTNDLGEKTKNHQTNYSNNPKFDYQYNEEKEKEEEKESNIINVRRQMLIERSSYKKAIEEAEEFVSNLHDLKKITEIQGLCKIYLNWISELEKRIILYKEKNKNKKKKKIFPDFIDDKLLATITVKWTIQYTFNPLKKKYSNNVSTQSKYFEHEYSYQSLFTHIAIKIGEEINNELNFQLLEKKNHLYNYMKKNKNNSSFSHFQKYRIIKQMKQQIGKGNHMKQHAMLGGDNQTSHLNSCANNNFDINSCANNNFDINSCANNNFGINSCGNNNFGINSCGNNNFGINSCDEYYGHTNNHVHIKHDDDNIIEWNSVKKATIGGLLLNMLIENAKMDVDINVAKNEFKNEYKYYLFLHKTAKNNAEDLYEECKYKKELNYQKFYEEESNTLKFIILDKYKKNNSYDNNFKKNYMEKKICTYNYGTHDKNVVKQNNGDKQNNGDKQNNGDKQNNGDKQNNGDKHNCANRQELQLSDNKKESNFCQKQREKLMRKEIILYRSKRDRNKIELPVFIHSYVWKNNNWYGVIHMRECCANYLLNNAINSHIPLNYLPMICKPKRWENFEGGMLLLKNSFIRCNIKPLFNLNVCNLNRIKNIVSEIGNVGWKINKEILHYIEYAYIHGITIGKIPLYKNYTLPKYINLKEQNNEEIKKYLLLKEEINRLNKCLISERPTFLQKLAVAKTFKDNDIIYFPHNIDFRGRMYPLSPHLHHMSDDICRSLITFAEQKEIGNKGLFWLKIHLANTFGKDKLSFQKRIQWVDQNINNIKKLTQQPFDNIEFWNMAEKPWQALAVAIDLKNALESPNASKYKSSIPIQQDGTCNGLQHYAALGKDKYGGKAVNIIPSDEPQDIYSVVLDIVISKIKNDLMNISNGHHNNIISFSINENIKTNKKYNNNINNNINNYNNNNHNRNSNSNVNKNELASYCFKFDLLKRKVVKQTIMTICYGVTSIGAKNQVKGKIQTMIGKELDKNIINKLSQYIANYIFESISEIFKRAMIIKKWFNNLSKVTNELNIPITWISPIGLPCEQPYRLGNRILVNTPLQSISVISYKNSQLHKNKQRLGFPPNFVHSLDASHLMMTAEKMVIQNNFSFAAVHDSYWAHACNVDIMNQFIRESFITLYNEPILENIYNNFRIRLGKFATKIPSSPEQGELDISMVKDSLYFFS

SEQ ID NO: 56 - protein, 1320 aa, Plasmodium falciparum
MLPCVIISFLYLFYLTYIFKVVIIYCDSSFNRKNIKGHTFDSSSEYIHILRGSQPFFSKKILNKKILKTPGDKRGNYEKKHNAAQETKNDHLKKERKVVQTIKGKQDGQAINEKRDGQAINERQDGQIINEKKDGQIINEKKDGQIINEKKDGQIINEKKDGQIINEKKDGQTTNENNDSISIMYESKNNIEENSKESISLTPYGQESVVKKNELIKEEENNEEKTGAIYVDILNNNNNNNEYEHNSVIINNEQQHENVVDTEKYNNYNSDNNNDNINDNHNNDNINDNHNNDNINDNYNNDNHDNNNNNNNNNNNNDNMNDNHNNNNDDNNNDDNNNDNNNNINNNINNNNNNINNNINNNNNNNNNNNDNNNNDNNNNNNNNNNNNNNNNNNNNNNNNNNNNNNDNNNNNNDNNNNNNNDNNNNNNDNNNNNNDNNNNNNDNVDNNNNNNNNNNNVDNNQENKEEIINKKETYAQKDEKIDELNNDKTEEEKHIPTESVNNIKKESDINEQIDDTSNNDNNSDNKKDTDEGKQKENDTNVQEECVQENVINYDKEREQKYEIAINNLIKYHKELTDDDDDDDEEEEEEEEEENENNEINGVYRKIDESNENEKERDSYSKRNYPNIYVKYKDDLEFYNAKLKENDLDEFYDYIIGRRNLINITYKNEYALKLKYHKGYTTSLYNLYVVNELKLSDNMYSNFTSPLEEDDNPTLQEASYYADLSKIDIDPTVFKEYFLKVNQCDGDYLPLKNTLVEKICHLSHHLRKHPYVNKIKITNQKSMLYRIFLKVMKSFKNLSVQQCIRNVDESNLLDILFLFNEEIVKESKKELNLGKCVNNMIARNKDWYNLINLITLALLGCVTYYKEHYYLNKEEVEEMKATKKVVDLPIFDFFNEKVMDIFVPVDLETKIDIDLVEDVTKPTERRRKIFQTWYMAYLFIHKIYLISKMWNIVKNWEAADFVSNPWYVEHIGSALIPHIMNLHKIEDDEYTFFRYIDQVQFFMSLKRSKNFPISNYDKKNYHIVEQIITFQGTSSPSIWLTNLIYELTPYPFLSKGRLHKGYLFMFEQTVKPYLDGLKKVLLNELKNKSKYTSETPYAIIFTGHSFGAALAQISSFYFSKIMDLKNRTNLKLYSITFGLPTYQDSTFYEDFRNSGVIINNININHDPVRVIMAVPGINDFVNHDEERKLMINFEVEQLKKLNYDFGKSVFNAVEFFNVKNHQRSMLYVFAKYIFNKNVFLELGELHILQTHYYFYYVFLTLLSGWVNEADWGTYFMVPFFLFENIDFSHNELMNKCKEFHKKYNGEMVKKLPNNENCDDN

SEQ ID NO: 57 - protein, 348 aa, Plasmodium falciparum
MKINLSFNKNKENKNRNKNGDTDIDNDTRNNKSYKENNPMTRNKIETIFSMSDDEETINYENTHNKIIQQKKENQLNDKIKEYIKEHEEPALTTHEKKEDKKERIDEKNNKKKIQYLGYKSNELTKLNNPKTDDSYDYPFEEKEIYDNLDEKERKKKTIEHNDKDGHEYYKKDHKNHKKYTRSHENDNEVNAYNKDCDVRNKTIDKKTYMKKYDKNIQDYEKKKKKSENSDDDVNRSYLCIDDIFKKKENIDGKKKSKYMEALINSAKRRELEKEFLIQKKQKIDTEKEEKVFVTSAYKKKLMDRELIKKDMDLEVEEKKVDKSSNYNLNLFLKNINAPSNYNRYNRR

SEQ ID NO: 58 - protein, 49 aa, Plasmodium falciparum
MFLLNNEKEESPKDILLNEFKYKIRILAGIMFAIKTIPMVINAFNEKTE

SEQ ID NO: 59 - protein, 345 aa, Plasmodium falciparum
MSETSACPLNDFFDIDEENNLDEIKKEEKDVFSGNFLSYIYNQFEFCCINFFDELKKKDKRKNITLKKNYSDGYSKNDNGQCYYNVFDKILKKDVDTIKEVSLHSIYFNPHADWCECAHEFNLELNHEEAEFCIFNFFLKMYRYEERNKDLLLSILLECLYSKKDMKKAFHIQKENLKFLKEIKNIETSNFKESLNELINIIENTNFIQFNANEKKDMQKYYFKLYIIIKIKYPYGIYIFNCDDVYDIVVIDCNTFMQNKPKIMSFLSLRKFISFLNNIYSININEENIYDSFPIIVYESKECYHLSHSHLPLNLTACTPKEKKKNSVKNHLNQSGNENENENKD

SEQ ID NO: 60 - protein, 1224 aa, Plasmodium falciparum
MKPVHFNNSIINEDNLDLLQCDDKKKEGSFNIFNNNNNQINNVIYDKNVFPNNYVQNKSHINSEYVNNMDYLSLHTGIEKYKYRKNNNNVKNMILKDEDILYDYNIHLSNHLINHDINFIYSSNNIFNLCNNKNPKYFPNSKNSNEIKKDHKNKVNVYTNNIHYHTKKNKNFYSNPTEVNYNSLLSNNLKHNSLYYSFRKDTSNFNFSCDKNNTTFSKPNCLHESNPSSTSTCYPNVNTIPLAINLLNNVNDDISPIHPLPLSESSSTSASTSASASTSASTSASTSVSTSVSTSVSTSASTTMNSPRPSDNHISNSFPLSRESRATEQVNRLYFPVNDVTSKSDPNPNNELTSNMNPKHEPICEETRNDNGHIRNNSIYPLSHKSSYNITTKGHTNQLEDEKLHRDDNSMFDKVSYEWKDEDEKNDCRNEYDEYFQKKKKYNYLLPKENEKDKSTKGKIRELYNNFKNTLNKLCHEIFFNSFQTMFSYFITTSFFIIINLYVSNVCTYQEIAGFGVSISIITILNCIVDGVLNSLDYFCSHSIGIGNMDKAWLYLNCAYYFFYKLYFLLFVFFFLFKWLTFKIIRNIFVAHMMNEYLMMIKVFFSTVQILLVCYFPYFIYETMRRFLILYNNIYPSIYTSIISVICLNIFCYIFIIKISMLYTGAPIALLFTNIINMCMIMYFLKAFIYRCVVRPTNIISSLRDGEEFMSCESIPMDRQHLTGNNLYKNINNGDRNDGVHGHVCAEESCVYEDFSSPNEDNLEREQNKINDNNCDEKNNNCDEKNNSCDEKNNSCDEKNNSCDEKNNNCDKTKWTCHKLLEDNYYKKYNVSIPHRYNSMDSVLDFYDDYDYYHNMDTYNYFNDKCKNNCKKCCKKVKVRKSQRENKKNITKYINNNKNFGKNKNYGKNKNYGKNKNYGKNKNYGKNKNYGNNKNYGNNNSHVFIKNKEMYNFLFLFFNIPSVETRNKFFCITKTNIKNIFFEILSFELQLFESTYLCLTSVAAYVQINNFLNLVYYLSNSYGIILAKLIGVYISSQRKREKDNQNKKYNEYNLKEPMKEYTKLFVEKNEEVNDIKNKKNFSLTEICLAFFLLLSFLYTCLTVLYVYHKNIIIFFYTDMKLQNQLINIFNILNLELYFEALASLLNSVIKGLSLQNEITSFTFFNFMFLMNILGLFLSFFLKWELYGFIYSNLICMILQVLYLIIFLTNKFYIKNTHKEQIFSY

SEQ ID NO: 61 - protein, 229 aa, Plasmodium falciparum
MKVSKLVLFAHIFFIINILCQYICLNASKVNKKGKIAEEKKRKNIKNIDKAIEEHNKRKKLIYYSLIASGAIASVAAILGLGYYGYKKSREDDLYYNKYLEYRNGEYNIKYQDGAIASTSEFYIEPEGINKINLNKPIIENKNNVDVSIKRYNNFVDIARLSIQKHFEHLSNDQKDSHVNNMEYMQKFVQGLQENRNISLSKYQENKAVMDLKYHLQKVYANYLSQEEN

SEQ ID NO: 62 - protein, 373 aa, Plasmodium falciparum
MIKRYLKIYPSIYFTKHVYTAPEIDGSKDLLKKDYVFNQYVNKKEIFLNNKLKKGNCENEIKRIYYFKLWNAMVEHNFTLFENIIQQYLNEGYKYDEVIYSIMTHAYILNHKKKNENAYLVIEEMKRAFMHPIIIKINERMINCFLELELIFCEPSKSLWINVCRFIWESSIKLNRERRRKLKEKLNLLEPNQVLKLTKEDVKKLVKKEYEETLLSMMDTLSLDGEDPYDHILIDRKENYMKIENQKDGNFFPSNGNELTCLNNNHIYNDHINYLKGNIENDTSENVNSFMFSILNEGKNKTTEQEINYQDDYNLNNNDYMTKITNINSDNNIMMNMENEHMYETDEKDEHYESFDDAEDFDIQLLKKYYNLK

SEQ ID NO: 63 - protein, 956 aa, Plasmodium falciparum
MMDVYKEENSDLLNHQEEEISRNSNINDEFSETQLRDNVYEERENEYINKHNMMDDIQIMVDEQDNNNNYDNNNYYDDNINNYDNNNYDDNNYDDNNYDNNNNNSYYEYNQNAYEDNEPYNDYNDNNNNIINGSKYINEIQHNDKELYDMSYENNLNNEVLNVENRKKKSNNYDNVVNSNMGNNKNNTTANNNNNNHNNNNNNHSNNHSNNHSISHSNNHSNNHNNNHSNNHNKSHDVKDIPYCSFNNFQENEDKDGDKPGDVKSNNNMLRKKNSEENNAYNLFNNEKLKKLEKKKKKMLEKNKKKKKEDTLDDKKFSEVYNSIYENLKKKKEGKYNNDDNKDMMMMMMDDHKSNDNKHHKNNKHNNKHYNNNNDDDDDNDFYEINYNSSDNMNSVSSVEEDTLFNDDVLKKYIIGQVLNIIRTSFHWAITSFVLFFLFEHFSIFYVYRLISFLTLFLFTPISIYLVKRRNIKFFLIFTNTVRLLIWGFFIPFLYFLYKNEIKKYYVNRTYEFLFSFFLLLDNIQINISNLIDIDNNGIDFLSKKYDLRINEKAKRKFLTLHQFFFDASFIVVNPLIIFVMYLFSNLFNENYYKDVFIYTSSFIFSVITIITLVVYTLGLENVDNNQANKNNDYSTNYEEHNTNDSIEDMNEDLSYNNNEDNFDKYYEKQKQKQKHKKKEFHSSHTNSITNGYTDTFNNTYPNIYNDQTKKYLTERSNLEYMEYVNENYSLQEQYKRQFSELINNIHIIKKENTLLFYTCMLSYLNSVEDIMILMLIPLTSIYVAEFFYLKNIFVQILMAVILISLTKCFENISYYSNKKNIIALKDIFIGIILSGISLVLFFFPFLMLNHLNIYSFLIFYIICCLFYFFFSTNLKTTLSLNLQKTARETKSDIYNFVGLFMSFVNLIFVILTSFFLSILDNFVINYVFICIFLIILLVLFYAWAVFILKRGNNSN

SEQ ID NO: 64 - protein, 333 aa, Plasmodium falciparum
MFTFSSFKKVLLGVTFANVSVIGSCFYIYKKNRPLNDETLEVPNENFRIRIFDTLAKEYDEKNDFIEKITSINKYRRKNFRKIRGIVLEIGAGSGRNISYLKNVDVLVCVEKSEEMCKVLKNKVDKIKPPFSVYIIKDDIKNKIFKPNIFDNVISSFTLCSLEYVNESLQNIYNVMKSNGKFYLIERGIIYHKTLRYVLEKLKLYPNKKIPWEYGYYENRYPIDILKNNNFSIIFKVIKNAGSIYVLIAKKNKYNNNNNNNNIPLNDHNIIKPNINKVISNDQHVNKNHQDNSQKTQSINTISKVSKKNFDIHDILYKPNMVTNIYHSYIFEK

SEQ ID NO: 65 - protein, 521 aa, Plasmodium falciparum
MFEENEKEQLLYYERNKESEKCQKVWESIICKGLGYSKEEIRRDVERSRREKERLLSILYGSVFTGPKYLLYSKKWRGKTLNEIINEDREKNLNKNNFKNMDLDSTYFCELSFGYMDTAEENDDKNKKEITKQMEKKNDKVPNIRKGGNTNNSQNKRKTYHGEKNANTTNKDLDEFYSKLNYLEKRSYKNRYRNDNNNKKNNNNNNNNNNSNSNNNYYYYYSNGRSSYTNELSNEKNKYNEENSDEGNVIKYKYLPTGVFYSRVSKSFIANWIDDKTKKQVKIPYKISEYGIEKCMILAILSRNLRLSNLSNVLKYYDELTDSQKEQMLHAIRTTQKSEKLFEDIINRNGNKKNENNIINNYSNIHNDTSINNNNNNNNNNNNNIGNTIGTQHKNKNKQNANDQKNIPMKKKLIEKKKVKQSYVNEEKLPTGVYFYQGSYVANWWETNQKKQFKVPFKISEYGIARAKNLAIISRLIRSSSIPDINLILTQMENDHNLSDMDYTAISELAYKYIENMAKKE

SEQ ID NO: 66 - protein, 1075 aa, Plasmodium vivax
MKCRVCILLLLLLVGVRRGRANVVEDDIFYQKGEVEKLTFSLDHRVRDKSKKERVDYTNGENAYAYVDKAIAKVFTLTSEAEIKKFFSLNKDVKTCDYLIAQGSLKKDLQKNKCYRKTFCGVIPHREYIPGGGSSNKRESDLIHCAYMNDTHIVIYHVGRPHLLKPNVVYEELFFQESEKGVISCHAMNINLRYVGIHTSGNNTCIQDYLQEHLKELCNEKKACEIDFKNVKKGNSCSLENNFLIHVNYECVDSCNQKENQTCDIYNGEGRMTTCRYGYNMLPRINDFCEKNYTCNSRVCSVNQFCDEATESCVCKTSLLPVEKTHCLYTHVCDAIKCPEDATCVVERNSKKAECRCDEGKYLHKNECYNMEELERLIKAETTPHEKQYKKDLFIRSALKPEHIYMHCEEGYSIHVVNATLSCYHISFKENKIKYITDRLREACNGRGRCAFGNSVDQVVPPLDSANMCGTKGTIYQYEYVCVRGGPSPPVPVMAQLGRDPPPKSLTKEKGAIFRSRFHSQIECPGGTITVNKAFLKAGDGCEDLDLTNSVKEYCDQLSFCDVGLTHHFDTYCKNDQYLFVHYTCEDLCKTCGPNSSCYGNKYKHKCLCNSPFESKKNHSICEARGSCDAQVCGKNQICKMVDAKATCTCADKYQNVNGVCLPEDKCDLLCPSNKSCLLENGKKICKCINGLTLQNGECVCSDSSQIEEGHLCVPKNKCKRKEYQQLCTNEKEHCVYDEQTDIVRCDCVDHFKRNERGICIPVDYCKNVTCKENEICKVVNNTPTCECKENLKRNSNNECVFNNMCLVNKGNCPIDSECIYHEKKRHQCLCHKKGLVAINGKCVMQDMCRSDQNKCSENSICVNQVNKEPLCICLFNYVKSRSGDSPEGGQTCVVDNPCLAHNGGCSPNEVCTFKNGKVSCACGENYRPRGKDSPTGQAVKRGEATKRGDAGQPGQAHSANENACLPKTSEADQTFTFQYNDDAAIILGSCGIIQFVQKSDQVIWKINSNNHFYIFNYDYPSEGQLSAQVVNKQESSILYLKKTHAGKVFYADFELGHQGCSYGNMFLYAHREEA

SEQ ID NO: 67 - protein, 214 aa, Plasmodium vivax
MYVAIYNIGKKKNIGSIVRSCVAFRVSKIFVVSRKKNQVNFFGHMGTCEYITIEYFSSMKELKTHLRDNGILLYACEITSSAVPVTRRPFENKDTAFLFGNEGTGINDETLSYCDKVVYIPQYGNGTCSLNVSVSCAIILHHFAVWADYPEVGISGKKFVLNKCATKLERYLNPSDDLLRQISEKRAQRAATKLASPDWAAPHFADPSPDLFPG

SEQ ID NO: 68 - protein, 282 aa, Plasmodium vivax
MRLLSAAAQGLLLGRPSAQPLLRVPRAVHPHVERPLLGYLPPPVSHFSTKRNNCTGYDHPRGAPPQLNKTYHSQANFRDTKMEFCQVDLDEFCYKQFDSTKKSCSFIPYDKNEFLDKVNELIRQKKIKVVPGYAGFCKHIFVENFTEATVETIEINNKNRDLIKTDYISRRDNELPVLIRWISKKDVKDIIKAKYLDLILYSREQIEKENKETKTVPNRKSNCLYSIICIKPQNVDYELPMTPITMLRNTLISEGGSGINLNRDKYLESVKYWRHHVSIIDN

SEQ ID NO: 69 - protein, 274 aa, Plasmodium vivax
MLEAKLNNASILKKLFECIKDLVNDANVDADESGLKLQALDGNHVSLVSLHLVDSGFSHYRCDRERVLGVNIASLNKVFKLCGANESVVISSKDDEDNLNFVFENNKEDKVTNFSLKLMSIELDSLNIPDCEEGFDAEVELSSKELTNIFRNLSEFSDTVFIEIDSNIIKFTTKGLVGDAEVALKPRESTSEDDVGVTIKSRKKIKQSFAIKYLNLFSKSTILSDVVTLGLSDSRPIEFKYEIKDTSPDADTLKVGFVKFFLAPKMDDEMDNKE

SEQ ID NO: 70 - protein, 426 aa, Plasmodium vivax
MWNLINYNYSGGGATGDGNEDGNDASGNGASGNAAGGIGASGIGNAIGNNYNLWSILGYEENPNADKDASQNGSDQKEVRPKEKKKKKAAKHFVRVIDEDGNDVVDKALGEDINEMDEDPTDKKKKKKKKKKKKKHLTSENRDKSPFLSDLSSYADYSPSDEGRGRKESHVTNEGGLGNQQECDASVSGEEVTEEEVIGEEASAEEATAEAPNGNEANGAGQAGQGTSAMANEWFFGKIKEILEPTMNQETISEMITNKYNSFNEANSGIFYLIENLLVRTNTQEKMELNKKQRSSYLYNHYNSMDSSVNEHYNFVNYSIYCINKELAANVELEATKMIKIYNYAFTKFKKDINFRDQIFADLVNEADEVSTLIVNEKNSQKKRIPKIDFLILANINSDNYNNIIESHSVQTPKLRLEDIFKINVN

SEQ ID NO: 71 - protein, 406 aa, Plasmodium vivax
MEGPNDSAEKSEGGPNYAIPENGPKYDNPESGPNYVTPDSGPNCANSANATFSFEMLDMIITSGNPSRAKSQEETNRMTENTTQGKPFCPSEERVEISSGTKRAKRKSSLREQTTNSDEDAVEFKKQFHNWGKREKKKKKKVYNMNTEVAIGSGSEFSLLGEFLPVEGIPDLASSKEEMSNLGDLVDCLSGGNSSGGEHYHMGGESDKRSATNERNEKHMNEQDVDAQLAKMQQADEEVLLSRNIDCTNCKYYLKELTSRNYMDFSYMDQYISEGESNLLLLKNKKIEELENGNKLMKRKMSKLKEENNFLSSKLDTLAESLSDLRDHFDKLVEENKSLKEENKRLSGELQKGQTCKEEVEGASKKDAKKKGASKKDASSSSHGRRDPPERDFENSIDNELFNELS

SEQ ID NO: 72 - protein, 237 aa, Plasmodium vivax
MEDYATEADAPRTDKRYLSYLPIVLENMMKVNKGPGKITSFHASKVPDISIKNYVERIGKYTGCSNECFVLLIIYLDRIVKVNEDISLSLLCIHRLLITATMIAAKFFDDLYYSNAFYAKVGGVSTEEINKLEGTFLHLIDYNLFVSSEEYDLYRHSISLAVERYLRRTRRGGKCVGKCAGKCAAKHGAKRAEWAAPVAKPYNLFNYTAPHRTNIIFLKPGDGPHHFQAPRGGSGRR

SEQ ID NO: 73 - protein, 1522 aa, Plasmodium vivax
MHPSPLQRTLLVVLLVRFFSHALRNYKVKVRPYIEVYPQRRHPSYSIRREKKRGRCFFPRRKTTWRSSFELFSGHAKDRDGNRAGEGDGNGDEGDGDEEEDNPNDGDPRDDEISYEDVEEYLRKNNVEDAREDEEGKKEIIKLINYLPTLKNEEDFFSKFGYTSREKRSMEYYFNEMKDLKERKQKKNHNILNFILSYYLKRKNSNGQSALRNYQSVQSYYDYINDVMHNRGASLSVASAQPPRKDNIFSRKALCSFISFYLKNANVLKYASFLCLSGLLTLSLKVLIRRIKLEDVFLLRNHFHLVYSLKNMHVCKIGAFSLLINFLFINKYHQYFCVTEDLFGTLFSNYFAYEGIHNLTKRKIEGFMRKYNYTLDDVLNSMNEIFSQYLFRQICANETIEGDVLIVLNSFVRLYHKLFRSNKENIKNIISLVVNKYNAHFAEKGEKRDSFLSRIFYIFYLLNVMFKYDVDSVERLNLHRGNGLHIPFFARRNRISGYFLLAHIAQQMGVKEKTINDSLLETMKGNYEAHIRGLLSNKQNSSSVLEDAKQMDLLTLDGAILEEVHEEIFVSILKRIMEDGNYEPVYLVAPEREGKVEMAALGSARGKEGAEGTGEGGAPLGGEDSVAHQEGDAEEQYEKSTDLGDDAAEQYEKGTDLGDDAAEQYEKGTDLGDDAADLDDAADLDDAANLDDAAIEDSDDNMYRHLENSVDYIVNEAATSGESRDQKGIIAEREKRELEEKKLFLNKWNDINFLRKYLHVEKKHMDRYLEKYLYNFIYGEYKILINNLIFKKMKNKNDHLFFLKKGISISNSATENIIKNILLKFVIKTKENIGIFFKLENMEKCLRLIHNLIYVYKKIKKKRKFLRVPSDEFFSLDDLFACNSYRAQGGAAGGGAAGGREAGEGPQTSELPPDELQTNKSSPDELAANDNLAHNDEADEELLKRIVHKDHLEGEGGGDGKDGILPQEERKKMYEEFVIKHMKNQSERKILKIIFNLNNDQVDREVEDNIIKRFLEKICTKYLSNMKEVDDRYKIIGQENLFDYKNINFMESLEREKSKKGVHKKGGERSVPEKDSFIIRKEDIFEHIDDDSFEEICKKMYINKIKEAKKNLYHMRKDLYMYEIILNIKNAQEIHDVFLMDEYEKMIKDIIKTNILNKNYKNIKNLYLKKIVNFLNLSEEKAADVEMRCIFLQTYEIFSAVKENFYIYRSDSDFVNNINEILTIYKNFDLIRPKGQQYYVKFALIESNYNLLHRIIERYVLYVIELINDENRAIYKENIFRLAAILRVSPAVIDEIATRIYKKYIEGQDLHAMNNMDAFFSFLFNMSNARQSEIVLEHLRKKVDTHLASGEGYQERMQKLYDVIFFINNNLQIRKNLFEVSSAGVEAVYAFLTACVEEYLHVKKTEAFISEHREYLNHLNNFLSKIKTLIKGDQENAHMSHVMNVLKKAIVRKAISHLDKFQYDMCVEEIYNLIKLQMVDSSINFADVDIEKRKKLVNIFSYQNISDEKKFLYMDILNKALL

SEQ ID NO: 74 - protein, 349 aa, Plasmodium vivax
MSAAAIGVENRCLMKNQKNGNGTCDSINVDINHIIKDIYGFKHGRKRSVQFINDDTLVNGQDLKKIIKRIKIQESYGSSSTGKHGPCDRERKQEEDSLTTPPQDATCSNSEDAVKIGSDRGSDRGSDRGSDRGSDRGSDRGSDSGLDSGVDNNSLLQSSPHSCNSNKHIRNSDKRSCPQEYDNFCESNRFVKRQASSSNLVRGDSATESLAHREENRKLLSKQFELCIDNVLEHIRSCNEINQAKKIMIPLLSEFILNNFLSLDDHERAQNGYKINIDTLQKEKKVLISAVKTQYQKIIQLQKLVESQKCEIKKKSDELNQIKAKVHQYFYDINNPNKRIFSILSPDVY

SEQ ID NO: 75 - protein, 1157 aa, Plasmodium vivax
MSHEWSDALEWRGNNSLESGREEEEEEGKKKKASCYELINDKIFVYRCNACLLVFTCVHSFSNHVVSENHQIKQLNSLKRGKTFGCLRCKYVCLSVAKIISHIETFNHGHNILRKIKRNMVYNGIAFCSCRVKCYTFYSQNKYCLTTGDPLLAEHEGVPNLQPTGEAVPNLQPTGEGGEGGMRPYDQSDSHHGGDVQFLPEGGWTPKGGSSLRRKTLGFILSTTGGAASNAAPNDADGAASKETDSATSNAAPNDADGAASKETDSATSNAAPMPCNQVGEQAELSPICTDLKKINDFNAVLLNLEKQEKQEKQRGRNMQGAANQQNGCTTDESRNLLLHIYENNYHLDQMSRRDSSHQDAHQNEKKCDALDETEGQLFSPPVGLNGDNAFAERENDPLSGYRFNPLSSYRFNPFEQGDFSLFPREDNTRVGTPGGEAPFFTHQGDHPQSGANNPDRKDTIRTSTTYSTLHEEGPSHINGGRSTRNKSSQNRPPNYEPIFKDHHKWDQFLSSEVANKIDQNLEGEMDEVKNSFLRSIQNSAKKLAALDALYLDEQMKGASLFCTDPPTACRSGGERHTNVGDEIGTNREGTPSGMPHPDEQQMGGFLNEDKFSPSEEDLKKYFCKNLLSHIFDYQPSSVVPTMGGSQRVDSGEPFSGKVAKAVGNTHWDVVTANNAHNMAERETPNRGPFTDMEYLPREGAADAAQYQTRRIDSSGSFLSPKYWQSQMDEMNRGDYNHMGGKDNREVSGSLVGATNQLGYTKHTVGRDKQRGDPHDASLFPPIGNALTYMKKKRSDNATEEREKKHQLDLLNYYRVQGGRSPYAHGDVQNGEGGRCYPQLNKASQHSNQPYEDLTPYRKCFGGWVAEEKNCKGENPLSRHAGPVSFTANAGVAVAKGMHQLGAPSPSGANFNERRLSQPSRRTSVSNPTDNAASPTQEQILNSIFEDPCDDKKICRTPSETDALNKKRQSFIDEIGEIKKSIEREKEKEKGNEKENNRPPTLTHMDPPYGQRMTPAIPLHSERSDFFKSGVLKKPSFYLGSRNNDGRGAYPDFKSIRANDPRGAGAHSGIPTEGGNFGSGHIQGGHIQGGHIQGGHVQSGHFQNGYFQSSHLDSHLDSRLDNRRDHFSRTHQERKKSADGEYDQRFSSNLSKWQRRR

SEQ ID NO: 76 - protein, 1181 aa, Plasmodium vivax
MKVKKARTKGGPARAGKGGKKLARGEKKLSKGGKKLSKGGKQLSKGSSAQSRVPQRKAQVTLSGPKKAASMVKKPVRSAGSKRYSWLFEKEGEKTQPAATKGRKIARSGGDGPDSDEEDAESAARSAGSSAVRNAREGEAKGKKKFVLYKNKKGKKSKGKGRGMLACFHHLGLSENMCRSISSNLKYNRPTDIQKLCIPKIVSGRDVICISKTGTGKSLVYVSTLVDLLAEHSQFFGVRGLVLVPTKELAIQIFKLSKKICKNFFNLKINVIIGGINLNKQFDMLKENLDILICTPGRLSFILKETNLSLEKVQMLIIDEADRLLELNYFNDMNNIYKSLHRTDKQTLLISATLPTDVQNYFKLKLNNPEVLSLSSDNSISEKMKLHFLFTRSYEKYGVLIKLIFLFKKKNLGKTLIFFCTKYHILFFSKILSSLKIAHAILYGNSDTSFRFDQIKKFTNTQEIQFLLVTDVAARGINITSVQNVINYSLPFSPKLFIHRVGRACRDDAMPAGYAVSLVTFQDVLYAYEICFFIGKRLKFFRRRGEATEGSQPAETTKRKELTDAADAANAANTANAANTANAANTANAANIADVVYLGALNHVSDYVELVDNQKSADEELLSLNKSIQASYKLYYAMRPKVSKYASTKCVNRINKIGGVYRLCLFYHPDEIYEDGPSYGAGEEVPPSGQQPAQVEGTPVDGEADGKEVPNADEPHVKEVAKAGEPDGKEAIKADEPHVKEVAKADVPYGKEASNAGDPPGGALAEPKTYTHNEVMTIIHNFQSNDSGKVKGISEDIKDKLNKLKVKMHTSRRSRSGEATDDMEELMGALAMGLSDHEHDSDYELERLWGDRQNGSAAQSEESSKPKKMSKRALKKKKKEEQQQQRQQQQQQEEEAPPNGGTKRTSINLPFDDILKKINEKKIKQETAAAFAIKTPGFDLPPDEEEELNKQRFIKKKVWDMRKRKFVLQEIDTFQSDGFKKDRRKDVGASAKGSHGEGAAAEPTSNLYHKWVKRTKNRIKNVGELEDERNQKGRNGFVKTKRENRLSRDDATSNHLGEEKEMHLQMLKQNHPEITNALSKGGKLTKKQQRLYKKYLSGRYMEPEANSALHKSLPQMQKEKAKMLQKKLRTDKNFRVKYARMKKKRHEQKLREKENLKSARARSLAIVKRKKIGKRGGSARK

SEQ ID NO: 77 - protein, 1396 aa, Plasmodium vivax
MGVLKLKSDKKKREKSKETKIDYSKCLKRTKIKEKIIRKDAENEFDLSIFAKTDHASNKIRQLNYAKLVKAIRKNKNLIANHVPKILEIYGKGIIDDDENVRNYSSKIFYHLVNSHIDFDVFHSKIKTCLFHSLKIGRVPLKVLNLELCHSFFFTKIHYCHKFFYEFLSNILGCFVSLPIEKQVTTVRYFFLLFKHKWRFKRGGRNLPSGVKQQGRGGSVEETHIDIAEEGDPPHGEEVPDDESRGDPDNCYEFITRTNRRNSCNDPFLLQKEKKTSIQVATKMEIYTKLLKCLCNFMDEVVYNSINVDLIHLYTKILKVITFMMKKKKKTIFKQEMMTLLNNFLQRAMGVINEHAAEISSCKKVLNMICYFILLVLSLCGKEVKHFEDANRRASINYAGLVKYCLSIYFYALLRCEFFSGENPEHQRSGGAPNGDVKRGNPLHHSEGSSHTEVSTHVLNKLFDGKRQKGTHKNVEKYARKYFHLLVCLYEMFIHRKDRKTLWQDGEPREGKTSGKNTNQKEKSNNSNIAYSHAERIIKLVEKKILLYENGGEMRVLCGLVLNYLSNFSQRSIDQMDRFCYFVIILAQQANGGVNQLDYEAPLVGERLSNSSKENTQGSSNQGRSAGVWDEGGSQKRGSSFPFLTTPFMFVLLADCECFINSNFFDAFFEIFNEEERRRTMEAISFVQNGGSTINIITRKTFDCFVGNLFSILYSYENPLFVNNCLFFLSFLSVNKRKVKKPYGDFKHWSGAKLEMEQLLLLDVRTHLDDVMKDKGEILIDHFLSKNRHVILSFEIISNLYFVYENRSSRLLLFIYFLILKFEKEGSTLRFALGEEEAMILLDRVFRTPHRDDCTCVVNTQGSYSPLVGLSPEEGPQGDAGVNPDGGRTEEGTPLCLLEKKYTYRINKDYLYREDFLLFFLKMSLSEWDFIVRNDIYTVMQVKGSNGGGDKAVANPSGGDKTVTHLPGGDTTVAKLILIIKRMAFIISNVNICMGNKAKNPNNSLFIMDYLFGVIERVALTRLPQAGCSNDCDRLFLLVKAAFLFYFVSFYLFPCLLSKRRGSFNLEGGAIDEGQNRRGREVTGDLTAAKEGEADLQSDAPVGREHIYYDHSADVTVDVPTFVAFVKETLFKSGSKEEESQLDKFAYVMPHSHMACRFFDVLFEQGVMYACSVNGDLQQMPSVDLEYNLSTHVEFQNMLTKIESSITIVSFNSIVDVPVRGIIKLLTITIFKMSLNRNILFARLVNNSDCFPNGYLYDLNFFFFFHHLVSSLIQRVRGLSDGPFSQRSYYCISFLIDTLLCAYCIMEEVAKTMEVTPCRGATGDAVNAAKAANEAYEGDKANNPDGPDVPGEPPLAAAKWSLQKLNERLRCTLNEMPQKEKRYLFPRVKLLVEKYL

SEQ ID NO: 78 - protein, 1276 aa, Plasmodium falciparum
MNYTNTIRREKRKRQEEINNVIQKKIKNCNMLKYYQNTKQNDYDFSSLMTKNIGINKSQQIFIKNVHNDENLCTYENDSVQKATHHLIKNEYNDTKFLLYDEMCVNQKGNKNVQFLVHLKKYKEECSYPHFIRKGLKRKNEKDMKMIDDEKYDKKNICNKNIYIERPCEQNAHIKEKNEQDVSTCNDMNRLKGYKKKLGHPKKKKTNHKGNNNNDGDNNGGHHNGGDNNNGDNNNGDNNNGDNNNGDNNNGDNNNNYYYNNLCNNNCEDNKAHSHMWEGLLKKDVLLLLIQAIKNMGYKKSAKYLELESGIELEQPLIKKMHKNILLGKWKNAIISLKKLNINKKLIKAISFLIYEQCFIEYLYEGKYFAALRCLRNKLEKCCFDQDTYYRLHQCTTFFMIINNNNENYDNCQNNDNCQNNDNCQNNDNYNNNFYYNIQYTCKEKYKNSRSILFEKINRLLPEHIIIPPRRLAILLHQSLKYQVDNCLFHNHFSQKTLKSKRTMKCTRMDNSKLYKRDNEKRNKCNKSECKRKQSHMTKNIKKKKKDMKVDDNIFRKEKRKNKNNKNKMNDPIKIRCPTNLSSNNEPTNNNNITSVTTKCLSNEDTLNVSNKENTTFMNTSMWNNENVQQNGEQYVQQNGEQYVQQNGEQYVQQNVQQNVQQNEYNITNINLSYDNSKKKCFMTYPPRAEKTVVPHKCNKEEEYQEDVYNANTSNPTSLDIYNNSTTYENQRKKKRNIIIKQECNEEMSSNNDQNYVIQKQNNDIIIKEGTIENILKTYEDVIITNKNIEHNNNHTDKGNNEDINNLKNVENNLVSNNNNNMELLNYKNKCCISNEIELQQNNVDNEKMKQMKVNYNVKDKNKYMNKKQTNKLNNNNNNNNNINIFKTCNHDNQDEMYQSRNHFDCKEYPTKIPCCYKHNELHSLSLLKNHECKKIKLPYYCIKILQGHKDEVWYVNVSPNGKYIASSSKDKSIFLWKGIYPFNKMREWNGHIDGVSYIIWSHNSKYLVSGSNDSNIIIWSPKSNKRKLSLNMHSGPITSICWSKDDSIIVSSAFDKKIFCTKLNEELKSFSILYAWSFSTRIQNFVFTNNDQYLIVVASDKNVRVIDYNQKKELYILPEFDTITSVCASKLYNHILVNIADQKPTIKLWDVKYRYIIQTYRGHKQGRFIVHSTFGGKNEDYVISGSEDSLIYIWHKTKGYLLDVINGHASTVSIAIWPLSYSKFPYMISASDDHTLMIWNVHPKINKIKKEKKKTKKKFIHPFLRELTKYHSIKN

SEQ ID NO: 79 - protein, 1240 aa, Plasmodium vivax
MNVTSIINREKRKRQEETSHVIKKKFKHWNMLNSLEGNTQNGIASSSFCTEKVHTSEYTQEGVPNITSSHCAKYGERIDVDKATSNGVCAYTQGGSAVVPLCNNREFSWAHPNEPQFYLDVAAGGGQEDYPEHEEWEKQGGGNGLEGNGMHKLKRTRGEKPTGGEIKGNEKKKKKKKKKKRENGVGHSDSDSGGSDGSGDDGSRSRGYRNHRSSQSSCYCSPPSSSCSSSCCGGRSSDFSESRGSYASSSRAPNRGKHHKRRKASEGNHNPSTSDSIWEGLLKKDVILLLIQAIKNMGYKKSAKHLELESGIELEQPLVKEMHKNVLAGKWKSAIRNLKSIRVHKKIVKAISFLLYEQCFIEYLYEGKHFAALRCLRNRLAKFCFDEDTYNRLHECTTFFMSLNSTHLTKKRQKNYQMKIKNSRKLLFEKMNRLLPEHVILPPRRLAILLHQSLKYQVDNCLFHNNFSEAKLISALLQGKKGRGELDASIEHSAAIGAGAAIEEKTPRVKAATPYNAACQAKTLEFKKQKKLGGDDQVDRATNSCFSKKKNSKQEDEMNLCVSDFSRYHQHVGGESSLYYHKANPNPKSGRADLEGSDAYVRLDHAGADGGLPCEFASSETLLNEAPLNEAPLNETLLNESPLNEPPDKPANYMGATTLLWDDELEGENHFNVTGGQPVRKNTKLKSAMQPGEQTRTSPRRSGADVTTTATAKTAATTTATTTAAALFANPFPCLKEAIMKTAKSTACRKYAKIASSGPKICTLNGSTSEQRKGETPSELIVGKHKIQQGSSLPGAKNVMNPNDGFANAQDGGNESIGAAKKGEKAPPKGCNGVEETLHPQAGHNHRSVHPEGKHDDREVKEERRKQCARQDGTHHGMCEESGRKTFTLSLLKNHQCKKIKLPYYCIKILQGHKDEVWYVNVSKNGKYIASASKDKSIILWKGLYPFNKLREWNGHVDGVSYVIWSHNSKYLVSGSNDSNIIIWSPKSNKKKLSLTMHNGPITSIYWSKDDSTIISSAFDKKIFCTKLNKELKGFSVLYAWSFSTRIQNFVFTNNEKYLIAVPSDKNVRVIDFAIKKELYILPEYDTITSVCASSLYNHILVNIADQRPTVKLWDVKHRYIIQTYRGHKQGRFIVHSTFGGKKEDYVISGSEDSLIYIWHKTKGFLLDVINGHASTVSIAIWPLASSKFPYMVSASDDHTVMVWNVHPKATTIRRDSRRRRKKFLHPFLRELTKFRPVTR

SEQ ID NO: 80 - protein, 1006 aa, Plasmodium vivax
MFLFRKKERDKAEEKRERAKGEDEVVSEEKAEEKAPVSNPFQNIQKGSQEGKTESDSLQHEGEKEGERKKKKKNSLEEKKHTGGVPQEGEKNEKELSPQMGSTGSGENTNGQAKHSKVALEEGTPPSGSSHVRRDTYRLIPNGMKKKKINLYSSSSSSDASSNEDLFSGKIKRKMEPLEGGEYDQIRKKDRREEPQGGNHVGSGSTTSKAASGNSKIIANLSSGGEKLIFLTKRDREEMKRKGGKREGESTPLGEEDHPRGKLQGKEVEEARGRKKQIGTNAHSKDERRSLRRNSESNEGSGESDGSGGRGESSGRSRRGSPRRSGEAHTYAKVESSLAELNMLNIGAIERESQREKELEIIKQQYLGLNKKKKKMQKPSEKFRNIFNFEWDQSEDTSKNDTNPLYQNRLEPQLLFGRGYIAGIDVREQRKKNNFYDKLVQNRINFSVRKGAIEEGSLRRGPHHRGGPNVVSGWESGVAGGSTNGASSSGTVGLPSRLGPSALANTPNPMEHLTNPSNHSLSRSKTGEFIYEPKVNNIIRDVHNKHWSEKKREEMTDRDWRIFREDNEIYIKGGIVPPPIRRWEESNLSSDLLKAIKKAKYEKPTPIQMQAIPIALEMRDLIGIAETGSGKTAAFVLPMLAYVKQLPPLTYETSQDGPYALIIAPSRELAIQIFDETNKFASYCSCRTVAVVGGRNAEAQAFELRKGVEIIIGTPGRIHDCLEKAYTVLNQCNYVILDEADRMMDMGFEDSVHFILDKIPTTNLKSEDDALALQEEMMAKAGHRLYRLTQMFSATMPPAVERLSRKYLRAPAYISIGDPGAGKRSIEQKLEFTTEGKKKQKLQEILEEYEAPIIVFVNQKKVADIIAKSISKMKFRAVALHGGKAQELREQTLNSFKNGDFDILVATDVAGRGIDVQGVKLVINFDMPKDIESYTHRIGRTGRAGMKGMAISFVTEQDSHLFYDLKQFLISSNNIVPMELANNPASKVKPGSVLHAPKKPHAVFKG

SEQ ID NO: 81 - protein, 365 aa, Plasmodium vivax
MLSVPYHKIAKQERLEDPELKRVLAQNIYDNVKNNIAYLEETQYNPCECNHCRSDIADAPLEDTELRINVSTAKLGYKRESEKACVEDREITQNNVQLISEVEGETSLHPKTYNILKNHKDNLEIHQSIPPLKCESLAEFTPRRSPHQKSQRLPKEEDKMNNHRYGEYSPMNGFGYNHHNSMNANGFCTNTDNREMANLTMQQHNMHGRNNLMFEDGNIPYGLYGQANYTGTNSLMCGGTPPAYDPKMMYRRNHETNEPFYNHYPVASGMGYNVPVLPPQPYYPSMKRNLTKEGYTHGYHYMNNASSHGALPKYPSDSVTDKYPKKESCRKNVSKVKKGDIDINIETSSSGRKGVIIDLNIGVGG

SEQ ID NO: 82 - protein, 336 aa, Plasmodium vivax
MIPIMRVRGRPTLADRSTVCAVARRSFYASKWVRRLQLLNEKYNYKINAEEQAEYEEKKEDDKIEKVYPLWNSRRTGLLAYKVGCMSIWDVWGVKHAVTVAKINHCYVLNQKNITKNGYEALEIGIGNMNVVKQSKNNIGNYIKRKLGFIHKIKEFKCTSDCFLPVQHKFSARHFSPGQNLFISSTIKSKGFCGAMKKWNFSGKNASHGTESKAHRSLGSVSMGKTVNIVFRNKKMNTHIGEKTLVKCSNNKLFRINSLQNLLFIKGPIGGYKNKIIKISDAKGRAFNKFKDKIYLYYPTFIYKKNRKYKNVIDMPHSLQDPFLYNEIPLYEPTNK

SEQ ID NO: 83 - protein, 589 aa, Plasmodium vivax
MQNGGGSYWRPRGSPHNNRLGRRPWSEAPGAQSQHWTGNNLWRNHHTRGYQREQPAQGALAPDGNYLENYFSSYGNGYAEEGIGGGSGSGSCGYHYGGAPEQAPERESARLYNVGRGFSNMGGTPHTVRSSGPRRATLPRPPPAYAQPRALYHNGFPQMGSTSDDNQDMEDPYQGSTNVAENENRTDGSHWVSHTMDNSYEGRNVPHGEMPLMRGSYNFRKGNNGVGFPSTNSFVAPPHSNSAGRGASHWKKSTGELYGQGHSSFKHRGGKKRQKMDPPFKGESEGVETNPKKRSKTDGGDDDDDDDGDDDGDDDDDDDGDDDGDDDDDDDGDDDGDEVAPEGTNAHMKRSKQNGKFIFCHHCDVNVEAEKLEEHNQSEHIKCPIDNCGQIYNIDDLDVHLLNHIKNDKDEVILSDSKEIEKWIQERKKNYPTREKIADSLKNNENGKKKKKKKPNCLIEELLFESYCSAVGRNIYFKSKWEKSIFIPLLTKMEQNNFHNIYEKSYYPLFNNSMGKFFPTKQQRRPFKERQGIDSLNIHRKPPLLYQLMKKEIYLYEKRLIKCIEFITRSGFFDDSEGGAAGTDILELG

SEQ ID NO: 84 - protein, 564 aa, Plasmodium vivax
MQAAGKMRLLGQQLRRCGKWSDVRSAAVLAYSTKISPVEISKILEKKFEQFDFKTSANEVGYVLSVGDGICRAFGLNNVKSSELLEIHNSDASDSSGGAANQGGASNVTYGMATNLEYDNVGVVIFGNDRNIREGDIIKRTNRIIDVCVGHELLGRVVDGLGNEIDGGKPIQTSEKRKIEIKAPGIIARKSVNESIITGIKCIDSLVPIGRGQRELIIGDRQTGKTAIAVDTIIHQKNINEQVPDNEKVYCIYVAIGQKKSNIAKLVNLLKKYDALKYTIIVNSSASDASPLQFLAPYTGCAMAEYFRDNGKHALIIFDDLSKQAVAYRQLSLLLRRPPGREAYPGDIFYIHSKLLERSSKLNDSLKGGSLTALPIIETLNNDVSAYIPTNVISITDGQIFLESELFYKGIIPAINVGLSVSRIGSSAQYKCMKKLASSMKLELAQFREIVAFSQFGSDLDASTKKLIEKGKILTEILKQKQYSPVSISYQICLIYAATKDYLASLTIDQVQDFEKRYFEFLDSNYADVLRKIQANCDLAEVEDQIREAIQRFLELYKAEAGAA

SEQ ID NO: 85 - protein, 144 aa, Plasmodium vivax
MFKTMMFKTMRNYFMLNFKRNYRHYSRKKNINNINRKMNDPYSDLYKMNYYGNNFKRLPNKKTKSNEYELIRTSSNSFTYSSPYPPNINYTLKPYPDSAKEFYYENRKYVMKYKNVEYIPIKRMVCKGMSRRSNWDTYYLRVEK

SEQ ID NO: 86 - protein, 2528 aa, Plasmodium falciparum
MKKKKVIKLKESYAPKSSYFTKDALLTNIFQQSSENFVLDVECKNSQLIVNCINKLHKKNLQTKLKAINELMSYLSKYDEATVGHFFPSFLSVYKKLIYHPNYNLRESLNMSLKIFIEKIKTKIKKHINVFLPPLFLSFFDYSKNVKQVSNDILSLLFPLKEDLDRGEEKSSEEEKKEKGNAGKIKLYNDNKLYLNVKKLNINITNFYNCLIYIKNDLDEEALGYIKNRENSDDYHKSVYLFNVLCFYPSLLYMIIKFCKMNILEECKNDLNNMEDKLINNNMNGSIEYNHYYNNNDKWNLKNDIYLSKVRDIFKIQYNNFSNTYNSFFLNINIIYKENKDDVRLQKMLYLCVYNIIYLLKKIKINFMTLNNENVNESLCNYICSIINNKEEYIYKTINHLLLLLFFMDNRKIIKENFLKSYLSLVKQNKIYSNDVFNYNICLFLFLFKKEDIEEYFFFFFFLFYFLLLNNNKSCIVIYYDILLHLYDYFSFISIQQIQKNEKEGTNTIISNNDGNQESIMVHDIKETQTNVDDINIKNMEGTNINLLDSIKEKDNINNKLYVDEKYCSYVLCLHILLLPLEMILIQKKLLDCNYSYKNKDLYENLINRYYCNKKKINPKKDVKEKDKFDDLRKKIKDTNIDEKHFLLTFINFINSSKNKNDIIFSSLDLISVYVNNMYDELNKRNQNDILKNHICNDDKNDKILKDENNKNNYNESYNITNKKNRSQSEYVEYYEVLHFLFQLFSEIKNVLFSTDLSCHENVIIITRNKYISTLKIIFINTFMLIKNNHYKLINIVKNNMLLFKFFFSHTKEEPPSPSSLILSPLSSSFSLIIIFDIINKILSDNNINKDIYFDSLNVGLNVLYMFFVMYNQSTYYVELAKMFFSIVLCEPVDEDKAEEKFKVCIDVLQFMRRENIKFLDLSYEILRIYYHYIMNKCKDEDLLKTFYELIYEDEKTNRNKFLFDRQFYIDLFYVHKEKMYLTQSLPDITFCSFFCKLVLENLITYDCRDDTTNKNNLYVYFLLLTLLRVDFNYDEKLVQLFMTLDKKILLRYMEVLRSIYKNCRDDESATYGNGRIEKNILHSIMDDPYDDNTYDDNTCDDNTYDDNTYDDNTYDDNTYDDNTYDDNTYDDNTYDNNTYDNNYCDDNGRRTKEEGGYLFLLEIYKSYIYCGINYEMDNMEKKNLKREDNINNIKNDCDNVEEEENDFCVASNNKDENINNMNNILNKKEEKKIEQYVFIKRKNILSSSFINRLLFLYKLYYDIYKGLDFTHVIHCTYYFCLDVVEPNDIKITEELWSPSENYIKLEDSFFDYIYANMKSKKLYKFLKNVYIKEKDINQMDNYKKYDNLNLYFIIYKYMKKNRMLTCVRKKLISDIMKRTNKNNITFVNIIYVMKNIQDNKIFKICKALLKYMYDKNYIFLDEILYYLKDIKVKNNVYFKLKIFLYKEFIIKKVLMLKNVQCVEKKNFMKNEDIEMNTNEIYNMDNEDNEDNEDNEDNEDNEDNEDNEDNEDNEDNEDNEDNEDNKDNKDNEDNEDNEDNEDNKDNEDNDDEKINETPNLMLYNNNNSCPYIKILEMIKKYVPDYLHFYIDNNFKLNVKNEIQYLNLFHHLIYISKYTSFNLYIYKSVQKALYESLQIISLSNYDIIFYSLEFVLRSPNYFSFFIENNMVTVNKENIFLNYSFYLKTYYKKIYDKYISVYKNKRIVLNNILSNTYNVQKNCIEHNNNKENIIKISQKNQKRNKIKNKQLYEYNKGVHFLRFMYELLEQHREVILFRNLVESKTFIQTLIKIIYFILSIYSCRKNNNMINERYKDICIKILGHMLKHEEKYKNQDNININGTKKINRSNNNYNNSSSCCFPIIVDQDNNSQTHLHAIYKIYLLSLKFCVTEYFEYFEGMNIFFNNVKNIHFDSIKKHEEKKILDIYINTYYLYILFSNMEKFKENKIFIDKTFSLLFLNCLFIKRLHDLKNEGNPIFQEINKYLCINNDTHNEFLYFIIEENMKRGEKNVEQKNNTMDNNNNDENNGHSGDEKSGHHNDDQKSGHHNDDQKSVHSDDQKSVHSDDQKSVHSDDQKSVHSDDEIIGDNNFLEDNQSNINEENNKIFKIEGKENDYTYDKLNNIYVEEVEHMSDSSLNLTDDDIVSNFLCFEKIKKKKMNDLKKKKKSNENGRYQVNNTCLDKNIKHENNSNNIYNIDNDNIKNRYDNKTCTNNIKTKKNKSLYFLKKSLKNPFLLIDINKNILDLYTFLLEMNYLKILLSMLNICLSSEYFIYDSDTYQQFLLFIESNNFNIFHFFKDIKEIDCCLIQKNDSLKNAKKTKVYIFFFSLYLTLLLITTYPNESIIIINQNKLYNIITFNQIIFSNLIINYQLNQLKIISTQYVNTTYSYDPLSKILSFKYKIKEDENEQFEDMTAKLTLTFLPNYPFSHFIISDKIESLDKKAYIHNSIKSMYKYARNGDINEIFIKFDNIMNNYFENKAQCNICFMLLYDKKTCDKNCLKCKASYHSHCLHKWFLTSHNTKCPSCQMQFC

SEQ ID NO: 87 - protein, 2345 aa, Plasmodium vivax
MKKKKVVKLKEEYVPKGNYFSKDALLTNIFIQSAENVLSEVESKNSQLIVNCINKLHKKNLQTKLKAISELILHLSKYDEDEVSHLFSSFTSVYKKLIYHPNYGLRENLNLCLKLFIVKVKTKIKAHLSVFLPPLFVSLFDYSKNVKHIAGEILLIIFPPKGKAQEARGVEDPGGQHPAKAKKTQPGKIRLQEELKLYGVVKNLKVNLTNLYNCLKYVADPLSEEVTRNLKNKKNDEDYDYGVYLFNVVCCYPSILYMMVRVAKGGEAKPSVGDPPVEGDPIEERPVGDPPVEENEKTTPPNRRNLNPVKQFIRKEFPTFAGTFSLFFNAVNSIYKESKDNERVKKMLFLAVYNIIYLLKKHKLNYSEFEEEKANVAIFNYISCVISNKDEYILKHINHLLLLYFFSENKKMINGNFLKCYLSLIKHNKIARNDIFNYNISLFIFIFEGSDVREFFFFFFFLLLFLLLHGTASSLVVYYDLAQHLFGYFAGAGARAEVSQGSVTCGSTPILSEDGAAAHSLSEHDCHTVLSETILHLPLETILAQKVGVTYRHSFERAHHLCEALSNTYYCHKKKPSKDGKEKDKFEELKRKIIAEKLEEANFIRTYTHFLKSSTCADRTALSCLNMLSEYTGDMAKELGAGNNTLGCEAEPERSGDPHPRVDDSKLGIAPQGGSAPPSGRHKYHGAVDFILSLLTELKGVVFPPGGEEDTPGDVANQGGEVNTPGGVANQRSATLRTAFIHTLKSTFKIACLLVEERNYEAVSMVKKHWGLLEFLLAQGEVEDEEVSLERVFCVFTDFIKWGRRGEREQANQAEGAILGGDALFSSLDVSLNLLAFICSRGGKSCDALARSMQGTLLGAPPTEETAEKQLAICVKLINFMRKERTRFFDLSETALQIYSHCLLRGVGDRHPPECSPLKAFYAAVLGEAEDGGDLFGEQFYQGVFQAYRKKMQLSRTLPDESFSCFFSSYVMRMKEGDPLDDMHLHLLLAALLNVKDKHVERCTKEMLVSSKLSKVSTFSCLEAMRDVYMWCSREDYEEERRGKRWSSFTSSMVQFGDDYDESGSGSDDEGEVAGGDRFEVGLLVSNSLVRLTRIGEEVEEEEAGEDTNAALTGNDLKREDEERPTKGSAQQKDNEEAFLSLRKGDVLNPRFVERLLCLYKLHYQVECFSVGHLKRFTMLCFAATTPGAAEEEKPLQEPHKNEADRFCSFYHFAYANIRSKALFCHLVSLRDKVEADEGEEMGMLNLLIYVHRQLERRKRGRKLPSNCASISDVVCVMRQVNKWDVFNICRGILTDRRGAGGHSADAMREVIRELDRFKVKSAFDLQVKVFLFEECLASVVGVVGVVGGVDDVPGGDASLRDTKQYEDGIARLKERLPRDLHSYVEKNLSLAVKGELPCLNLLHHLICISRRYRDVHLFECTIVRRKVLLGLALQYVTWNNFDVFFCCLGFVKGAFPGEEPSPEGGGLPNGERSIPNGERSIPNGERSMPNGERSMPNGERSIPNGERGIPKGGEGTPQDGESMPNGVLPNGCPPSDAPLRDAPLRDASIRDSHRLQEAFFKYLSTVKSFYRKVHEEQSALHRQKWRALNETLAGSGSGSGSGSGSGSGRKASPSVDSNLKRQKGGAKKRESKRECHHLQQSKMGIHFLKYTLLKCQTEGKTFLSAFKEANKITADLKKLVYFITSISCYADGVVDDEMVTVATQLVKLLHQFDEQTVKSLYTIYLLSLPVSITHFCDYLQMGIFHLDEMNLSRKGLAKLMRRMLDVYVNTYYLFILFSNVAKCRESNLFVEKTLTILLMNLLFFSELHKLRGSHMFKFAVISSYLHVTEGGRNLFLASAAGGGVDGHDCRVLGVEADAEVGAAGVGGSPTRGDSPIGSNHLCSPSDESDDAFLSELNGGPPKTKGKEPPAREEAEVGRRGPSNSSRGGSPTLSPSRGVQNCEEGEGENGQKGDHTPHRQGSRSDTPQSVRVSPPANRTKREDSYKKKMNPLHALKNQLKNPSLLIDLNKNLIDLYSFVLDLNYLKVLLSMLNICLSAEYFVYEPELHQQFLAFLESQNFCVGDFVSDIRRVGDILQGGAAKRNWGGNSARWGGSPSMREGSSPRREDTSSMREGSSPRPNQLRNPPFPIQQRNKFYIFLLALHLILRLITIYPNECITITNEAKLHDVVNFNRILFSNIIISNQLKELRQISSGYVNTTFQYDPLSKTLTFKYKIKEDDSEQFEDVTAKLTLIFLPNYPFSHMVISDRIESLDKKAHVHNSIKSMYKYARTGNINEMFIKFDSLMNGYFENKSQCNICFMILYETKTCDKACSQCGTSYHSYCLHKWFLTSHNTKCPSCQMQFT

SEQ ID NO: 88 - protein, 1335 aa, Plasmodium vivax
MKLKTLAPYVIPRLAQLSKKSSALYVRRAIRRTAHCGETRAFISSKVLISREEAPASIKPSSTNGENVTLVGESAQCVGERGEQPPQGDPHTRHPPCEQPPPLRPDGATKNLDEQVLKELHSLIRSIQKLEKQKKQQIVKYINTLNKKYLQYVEGDIVAFFENLDQYMAANGLLMCDLGGEEVLSHIERVHMNLGEDSPFVNSRFNANSPIDVNGLFDVNFLREAKKKLYGEHIYPILQGAGEGHAARRPDLRSGPRNSPPNSPTTPRNWPPHCAAAGRDAPEEDTVNVRRQMLIERSSYQKAIEEAEEFVSNLHDLKKITEIRGLCKIYLSWVNELERRIASYRQRQRRRGGSGEGGTDGTTTAASQTAAPHTAAAHTASLAETGRGGLPELVEDKLLAIITVKWTIQYTFNPQKKKYANSITTQSKNFEQGYAYQSLFTHIAIKIGQEINNELNFQQLERNNLLYRYVKRNKANASFSHFQKYRMLCGIRRKLQGGGANVAEAAGEAVEAGVAVEANVAEASGSGPRDDFHLVQWNSQKKAAVGGLLLKMLMDSAKMDVDLSVAKEEHRNEYKYYLLLHKMAKGRGEKLHAECKYEKELNYEKYYEEESNSLEFVVLERGKGRGGEEREKEKGKEREKEGGGEDGAGGDNRASAASPANADNHAASPRRRENNFGKRRKEQLKNKQVVLYRSRRDPSKIELPVFVHSYVWRNGSWYGVIHMRECCANYLLNNAINSHIPLNHLPMISKPKKWTHSEGGMLLLKNNFIRCNVKPLFNIDVCNLERIKSVVSQMGNVRWEVNEEILHLIEYAYNKGITIGNIPRKQNYSLPSGPSHTAKQNVEDIKKYYLLREEISRLNKCLISERPTFLQKIAIAKTLKNCKVIYFPHNIDFRGRMYPLSPHLHHMSDDICRSLITFHDREEIGPRGLFWLKIHLANNFGKDKLTFEQRINWVDSNLGNIKRLSENPFQHVDFWSTAEKPWQALSVSMDLTRALECPDPSKYRSNIPVQQDGTCNGLQHYAALGRDYDGGKAVNIIPSDEPQDIYTVVLEIVRSKVKADLDGAASPPKGDRGKSSGTPNCAPPRCREHLAKCCFQFDLLKRKVVKQTIMTICYGVTSVGAKDQVKGKIQSMTTKVLEKKTINQLSQYIANYIFESISEIFKRAMIIKKWFNNLSKVTNELNIPVTWLSPIGLPCEQPYRLGHRILVNTPLQSVSVISYQNSLLHKNKQRLGFPPNFVHSLDASHLMMTAEKMVLENNFSFAAVHDSYWTHACNVDQMNVFIRDSFVTLYEEPILQNLYRGYQMRLGKHASRIPAPPDQGHLDVSLVRRSRYFFS

SEQ ID NO: 89 - protein, 1960 aa, Plasmodium vivax
MIPCVLLYCLNLLFLAYFLKVSCSSCDMTINRKNVKSFVFNSHSEYINALNRSKPDYPGNVFPTGNANLSKAGGHAAAGAEGAVKAGKGGKKKQEEKKPEGKKPEEKKVEEKKPAERKPQEKKPEEKKPAEKKPAERKPQEKKPEEKKPAEKKSAEKKLVETKPEEKKVEGKKPEEKKVEEKKPAEKKPAERKPQEKKPEEKKPAEKKSAEKKLVEKKPQEKKAEQKEAVKPEKKEEKRLQKEEQKVVKKLGQKLGPKLGSQVEPKLQPTVGPKLGSQIEPKLQATIGPKLGFPVDPKLQPTVGPKLGFPVEPKLQPRVVSKLGSSMEPKLQPTVGPKLGSQIEPKLQATIGPKLGFPVEPKLQPRVVSKLGSSMEPKLQPKVVPKLGSSMEPKLQPKVVPKLGSSMEPKLQPKVGPKLGSSMEPKLQPKVGPKVGKKVQSRTHQKTKEDHAQSQKVGDPVEAVPMPNQNVDEVVKENLLPSEKVDQWIQSIPLPNQKDGANSSLPNEKVNQWIQAFPLSNERVDKKPPTERPTDKLATRTPLSERRRAKKRDEWIKVMPLSNEKVDHRVQADLLSDEAANRTTLSERILSQVETQRIPSTRLPTQVDNPRVQSECAQGKIKMANQKTPGKRVPSERVGQKKPKEDIATPPEVRGIKKYADKLQRIAKREKREVAKEEKREVAKEEKREVAKEEKKVETNEETKGDSTEDTSGDTSGDTSEDAHTDSYEGVPQGALKEQKWSDKKERNKKGWFGTYWSQSTKKSKPSKPANAEKKGAKKSNLIPLICKRANMRKDEEFKLTEENCLVTELPKKDLDASEKKNLENEPPLDKEGMIQKVDGSYLRVQPIDYNRAEKGIKDEEKITRRGSFGFLTSPSSSYHLGEGIINTQEPLGVCDAEAGKHLDILSGQVVRDGEGVDPCNAIKRSDGDVVSARGEHNVIFGGVDQVKRRGAKSKRRREGKRRRGEAKRKAGGARKEEAKREEEEEEEVKVGEDEAKKEEEEEVKVGEDEAKKEEEEEEEEEVKTGEDYTKKEKEEEEEEEEAKVGDDEAKKEEEEEEEVKMGDEETKEEKEEKEEKEEEEAKVEDEDGNVKRKDDTEDSGIDSDDAQKKHAEEVPGEPAEGAHLEDKLYDDYEDEDDYDDDEDDYDEEEEEEEEEDDEEEEEEEEEEEEEEEADDIDEVINRHLEEVEKIEQSLGLAKKEGSSEMVLVPTPSKGSKFDNTDTESVASASTSTSGGNDDVGGEEKEFGKKDRFRYKSTNVNVYERYKKDLKLYSEMVKDNELNEFYKEIIRNRELVDVNYKNEYALKMKYHKGYDFSLHNLHIVNEQKASEKFYSNFVATCDEEDNATFQDVNYFADLTKVDIDPVMFKEFYIRSSVCDGEYLPLKSTLVEKICFLSNHLKKNPYINRIKIKSKKSILYRLFLNIVKTFKKLSLKQCIKNVEESNLLDILFLLNEEIVKESKKDLNIGKCLNNVIARNRDWYDLINFIVTIMFGCTTYMKEHYFLTEEERNALITTDQVVDLPIFEYLNSNVIDIFVPANVQTQIDVDLLKDITDAPEDKKKMYQTWYVCYLFTHKVYLVNKMWNVIKKWEASKFIPNPWYIDHIGSALVPQIMNLHHLEEDKYVFFRYIDSLQIFVSFKRSKKYPLPNYDKNNFHLVENIVAFQGTASPFMWILNVIYELTSYPFLTKGKLHKAYLFIFKRVVKPYLHVLKKNILNEIKDEKSKYTKENPYVIIFTGHSFGAAIAHLSSFYLAKILKARNNPKVKVLSVTFGMPMFFDEQFSEDFRKSGVISNNISIDYDPIPCTMAIPGFNDFKDPDEEKKLSIILKVNDLKSINHDFGENIFNGNELFHHERNQPRSMIHLLTKYIFNNNIFLELGELHISQTHYFFYYVFLTLLSGWANEAEWGTFFLIPFFLFDIINFTHSEIMTKSKEVHKKYREDLMKKLQSSQKNKGGGGKK

SEQ ID NO: 90 - protein, 322 aa, Plasmodium vivax
MKINLSLGKKSRGEGVEQRTGNEEGTSTGALKKGSREVDRKSDKEGRATTKETGVKNQMGDFFGTSDDEEEPYELENNQNKKINEEKNKQIEREIREYIYEHENPGETNPREELKIDQTDKKKKIRYLGYRGDELTKLHEDRANHLGGKKQYGPSYKEQGDNRSDHRGDDKRGEKRSNDHHSPKYQSGRKTREREDDAAAKDEVEKEIRIDDIFSKKESDQKGKSKYMDALIGSAKRRELEREMLIQKKLKIDTSKEEKVFITKAYKKKMIDRQLILKDMELEHHQVQAENRQSSYNLNLFLKNINAPSNYNRSNRRPHGEK

SEQ ID NO: 91 - protein, 48 aa, Plasmodium vivax
MFLLNENEESPKDILLNELKYKIRVLTGIVFVIRTIPMVASLFSKSAD

SEQ ID NO: 92 - protein, 351 aa, Plasmodium vivax
MSDASTCPLNDFFDIDEENNLDELKKGDAEIYEGTFLSYIYNQFAFCCTNFFDELEKKKKKKNITLKKTFLDDYKNKKDVSQFQVFDKILKKSADLAKEVPLDSKYFNPHADWCECAHEVDIELTSEEVEFCIFNFFLKMYRSESRDKDLLLSIILECLYSRKNFKKEFYAQKAKLKFLKEIKNIEISSFKESLNELINTIENTNFVQINSDQMTSDKFHFKLYVTIQIKYTYGVYIFNCDEIYDIVVIDCNTLNNNMPKMMSFCSLRKFISFLSSVYSTNFSDENVHHSFPIVVYESKECYALSHNHLPLKETVFNNRRGNLQKKDILNDQGGDDLDGEQSEEESHGVES

SEQ ID NO: 93 - protein, 865 aa, Plasmodium vivax
MHVHTHGGHPVPLAGTPPTRGDGSKGYNAPSGGTPNWGDHEDVELTPLQKGDSPGKFPKRGITDGNEASPRSVGGSLRNNFSSGNAEVGQRQTVQFLRVDESVRHLPDGAFNFSRAPTTPMTVSTATPMYGYTPNHLRILDDDVSPMFGDLLMDDEHAEHVGEGSYFRLESPTVGTPRACLEVKDNQEGDAAQDTHDVHCRVLGNPPSRRKAKGRRTLCSSFSKTASLLCNEVLSKSFQTMVSYVITTSFFIFLNLYVSNSCTYEEIGGFGVAVSVITLLSAVVDGVGSSLDYFCSCSIGMANTDLSLLYLNIAYYTFYLFFAKVLLVFFLAKGLFLLFVHYLYGGSGGGGGGGGMLDLLRILGTLLGGRQNCEHLQMVHVFCSSLQILLVSFFPQFIYESTRRYLILHNYIYPSLFTSVVSFIFLNLFGYLFVFSFDLKYIGACLSLLLTNVFNFCCVVYFLRIHLARCASSAWGVHQLQEGALLSGDHYVEVGGGAAIEEEGEADSKEDDEEEGEADSEEESGAECEEETLNGSLNGACDESLNRSSNGSHNNSRCATGEGPLHSLAFLFFHKPPDDDRKRDFIKTTRTNVRNIFFEILSFEFQLFEATYLSMTSVATFVQINNILNLVYYVSNSYGIVLSKLIGIYASSRGGGKQKRRNRRSGRIRRSKMDGHNRPSKVDGQNRPSKMDGRNKPGGGRHNAALRTAPHHPQKHTLCESKPLRNRSRIVITLLDIVLAFLLMLTFLSLCLVVVYLYRDEIIPFVFTDVNIQKKLKGIIFVFVLELFLEVLASLLNSIIKGLRLQEEITTFTLLNFVFCMHPLGLVLTFFLQLDIYGFVYSNLVSMAVQVAYLVVFLALRARGR

SEQ ID NO: 94 - protein, 373 aa, Plasmodium vivax
MIRRYLKIYPSIYYTKHVKTAPEVNEHSVVLKKDYVFNQYGGQEIFLNNKLKKGQDENQVKRVYYFKLWNALTEQNFTLFENTIQQFLNEGHKYDEVVYSILLHSYVLNHRRKNEHAYLVIEEMKRSYMHPAIIKLNERMINSFLELEMIFCEPSKSLWMNVCRLAWETSIKLNRERKRKLKEKLKLMPPKDVLTLTREDLKLMLKKEYEDALLDMVDTMALEEGSSYDHMLIGNDEMDDSIGEVGGGEEGGVTQSTHLPEGLKYPLLAPSERGNKGTYDDELFDFHNNSVDGMHYPRDGTESVRDCFSFLYGQGTGGGEEEGALDDGELQSFTDVGREDPLNDDETDDETDDSFEDNEDFDIQLLKKYYNFK

SEQ ID NO: 95 - protein, 837 aa, Plasmodium vivax
MAGVHRAEEAVHGAEMEDGVKTASRRNEEYEGATYQQEYTSNVQNNQGEEATVAGEYPYEGNYGSNLNKELLRNVPNKKKKNKYEGMYNNKGKGEKEKKNAGEKENTPYCSFNNFEEGAGAEVHPNGGGFTNQGHDEEGGDNPGGSGQTGRSNAPEQSNDEQEDEAPFNQEKLKKMDKKKKKMMERGKNKKKKENVDDKKFSEVYNSIYENLKKKKGSKKSGEDHHYGNKSDFYEINYASSDQVNSTSSVEEDSLFSDDVLKKYIIGQVLNIIRTSFHWAITSFMLFTLFEHFSVFYVYRLVSFLTLFLFTPISIYLVKTRSIKFFLIATNTVRLVVWGFCIPFLYSLYRDEIKKYYVNRFYEFVFTLLLLIDNVQVNISNLIDIDNNGIDFLSKKYHLKVTERAKRKFLTLHQFFFDASFIVVNPLIIFIMYLFSNFFSEPYLRDVFVYLSSFIFAVITIISLAVYTLGLEEAEKTLKRSGGKRHSAGLESQATAEDSVEDLVEAGNYDGGELDDPDEDDVDEEDADEDGTATKRRANRRANRRANREEDEREQHRDNEDDFGKYYAKHSRKEEKRVTYNTYPNIYNDQTKKYLTERSNIEYDDYNGFEQMSLKGQYKKQFYELVDNVLRIKNENTLLFYICSLSFLNSVEDIMILMLIPLTSIYVSEYFYIGSIFVQLLIAVILISLTKCFENISYYSNKRNIIALKDIFIGIVLSGASLLFFFFPFLMINHLNIYSFLIFYIFCCLFYFFFSTNLKTTLSLNLQKYVRESKSDVYNFVGLFMSFVNLLFVILTTFFLSVMDNFVVNYVMICFFLILLLGLLYAWATATLKKDSS

SEQ ID NO: 96 - protein, 321 aa, Plasmodium vivax
MFTFSSFKKLLVGVSAANGGVIAGCFYIYKKNRPANDDTLEEPSESFRMKTFDELAKSYDEKNDFIEKVTSINKYKKRNFRKVKGVVLEIGAGSGRNFSFLKKVDILVCVEKSEKMCEEMKKKLEKIKPSYPVYIINEDIKNGLFRPNVFDSVISSFTLCSLEHVDHSLENVHQALKPDGRFYLIERGIIYNKMIRYILKKLNLYPNKRIPWEFGYYENRCPLQILKKNNFHVIFKLVKNAGSIYILTAKKQGGSSPHAKNDAFLPHANGGNAIQKSGHLQSEVNDKSEVDQTRGTGTPIDIKDILCHRGGAPIYYAYRNG

SEQ ID NO: 97 - protein, 660 aa, Plasmodium vivax
MNHLDENEVKYVKKQKKTRKCHSVWQKIIRKSLGCTKEEIKKSIANSKREKERVISILYGSVFRGNKYLLYTKKWRGNTLNEIINQDQKNYLNMKNLKTVDSSYFCKLAFGYVDQNDRNNFKKRGQSGQQKNSDPKGSANASGNAAYGGGTPHDRAGATAQQSGHPGGYHSNRPTSHTTHSSAKKTQPNHSNIVTRKKTQHSVKNTPITEKDEVYEKLNYLEKRSYRNRAKADSYNCLNGGTSSNSYYYYSNHFASGSANFNSAGNYYSVGSNDSSARNATSRSAVNRSAISRGAASRSNPNDGPSCEPQSDENTMIKYKYLPTGVFYSRVSRSFIANWIDDKTKKQIKMPYKIAEFGIEKCMILAILSRNLRISNLNSALKCYDSLTHEQKEKMLQAIRTTQKSEKLFNDLLKPNGGGSPNGGGSPNGGGSPNGGGSPNGRGNPNGRATPSALHSRASPNGAADGQTNQVNAQTDLLSGQTDLLRGQPDQPSAPMNQPNAQMNQPSAQMNQPSAQMNQLTGQMNQLTPLSSNSPNRHNEQEAKHTAVKKTGIEKKKVKQSYNNSENLPTGVYFYQGSYVANWWETQQKKQFKVPFKISEHGIARAKNLAIISRIIRSSSVQEVNLILSQIEQTRNITKLNYAAIAALAFKYITPPPKKE

SEQ ID NO: 98 - protein, 438 aa, Plasmodium yoelii
MADSVRSDANNGGNGSGGSGEVNRVVNMVGKIKPNFVIPKNVNINPNNNFSEYQREIHNSKIIKMNNNISNIKNDIVNDINSYMYGNKLNIDIRNDSKTMMKDIKKNRREYLVEPYKKINQDNYHIVKNILFNRNLIHPQIVNGSYISNCNIRRNSNSSVASNLSNNSNMINYGNIFYLDNKVGFKNVLKPNSQLYKDISILNNTKNKNPNELLKKKKKKIITKYEVKYFLVNTVKAIGCVLKKWKTKKMGIYFWFHIQCIESEKDLDFYINIFNFLFEIITGKNIYYQHNNINNIINIFKEFILYDCKHIFKKIIKILNNYAKKNSKHFSIFGNLKEDLLNVNKSLLLNESEQKSFLTSSDNLIPSTSQQVQNDVNNFENQDNKKNNFLEYLFNSIKDNYYSLEKNNTGKLYLSNMFSGFSELNYNEIFNVFLKQPN

SEQ ID NO: 99 - protein, 1436 aa, Plasmodium falciparum
MQQDGNIQVKILKDVNPYYYKKENPYDNLEYNKYVMNVNDVEGTNIIDDKKKDLGKSKYDIFTTDSLSTTTDEVSYSYQIENKNEEKEYLRYYDKQGGIIRQDNNNNENNNNNICNNDHNNNNICNNENMLTTKKNDNTIINSNIKYLNNNNIFNTNMVPQKNHTQIFNPYDKSMRNIQLYNKAVSFLKNDGDINSKKNTHDNLMFLKNIRSKSNNNLIVNRKITNHVTNNVISGMTNKVIGGMASGMTNNVTSSITNNMTSSMTNNMASGMTSSMTNNMASGMTSSITNNMTSSMTNNMASGMTSSITNNMTSSMTNNMASSMTSSMTNNMTSSMTNNMTSSMTNNMLNNMNRVVTNNIITNMNRSVSGSKSINMSNLLIINKMDYGNDIYHNNNNNNNNSSSGSNIVSGKYFVNSQNSSKNNFFTKVGESTIRSPTNILDIYKQGNMYMHIPKNADLMNNVSSYSIAHENYIKRDNTNVTHVLNNNHLVNINNVVNNNNLNNNNNLNNNNNLNSNNNLNSNNNLNNNNNLINNNNLINNNYVRNNQAVNNAHTLNAHFNKSDNVDNMRNHIPNNDNKNIVNMLNLKNMKSINDLSVLINKNKPIHHVINGTEVQQKRSLSNVQKLKTLNTFPNAKGRFSLINKMASMPNMSTTSSMNMSGLNTSSSEGLTNIINMNNINSVNNINSVNNINSVNNINSVNNLNSVNNINSVNNINSVNNINSVNNINSVNNINSVNNINSVNNLNSVNNINSVNNINNINYINNINYVNMNKGLNPINNVSNISSLKLLNNNNDIKKKFNTYGKSEASENLSKNVKYIKYIQENIKYLNNLDDNKRKYSLTSINDVGCIKKKKNMNDLFLGKHDNMLRTDEIPKINLGKNILNNNKIINYNDNDKSNIINNVINKNISTDLVNDREGDMNKMNIHNREKDENNYINIGDNKIKKNQIDVVNNKVMKLDNMEDEEAMNKLSLISLYPNNNHIINNVNNVNNVNNVNNVNNVNNVNNVNNVNNVNNVNYMNNMNNVNNVNNMNNVNNMNNVNNVNSVNNIKGINNMNNNNNNINMNRSYKMNMKKVSKKDNGQNVVSEKRFSEEKYNFLKNLIRNNKNMVKLKYLNKFLGKRSGPSIKNNMNDMMVKMNNNMKDIMHIKDATNINKINNKLVNLNTNNCISYNSCNKMNYIHKCKKKRVLCLDTKHGKNEIKQNEKLIYTNYEIKMFLLNTIKAIGIVFKKWKFKNFGLYFWYHIKCIENERDLNFYIKIFNFLFEIITGKNIYYQINDIHNIVALFKEFKIYDCKHVLKKSIKVLNKYAKKNSKEFSLFENNQHVVLDINKHMLFNDDEKKLTTCNIKQNEQEQIKTKVLYDHDNINVDTKQNYQKIITNKNNHPKDNFYSYLYDSLQGKNHIFQQPGVQNMHIYNMFAQFNELNFNDMFNFSIT

SEQ ID NO: 100 - protein, 1085 aa, Plasmodium vivax
MTEGEKGSVDVDPCKEDPHDYYQKENEKNQLDKYLIKMGDLTRRSSLPEDRDLYRAKYDVITTDSISTTTEEVSCLCPLEGKGDDKDTMRFSEEGEYGGASLDLTLDDQQSTKVDNGGSSGSSGSSSGRSSGGRSAGTRSVHVRSGHVRNGDVRRGSVSSLGKTVWAMGSAAASARKMDAPKFCDDKDLYPVDCGKLGRHSESFLINKSEMSKGKEDPCESLSSVKTPSSGSTTHQANGRLHDYASVLSGKEHESSNYSLRQNTHMTELSNESTPSFRPHGGYPPFVANQVNHMSSRNSAPHMFNGINIGTTVGGQKNPGADGNYTRMVLRGHPSLINCVHKSGNKNSLNALHLKNGGRCTHGVGQEGRGGSPPLGSNVKLIRGAADLERFVGNVGGGRSVNGVRNQEVARNGEVLRNQEMARSGEVMRNANSWRGSKGGAHSLAFSGASNNMRNISRTENLKSLSSQNSGMYHLSVRMNKLRSNTAVLSDPREAPPMLAVQAVPPVQTAMPPVQTTVPPVQTTMPPVQTAMPLLHGTQHPMHAAHPLHVAAHPIHTAATGTPKNAMHLLEGNPNYSPKVEDKKKLTTVSGGDVKVPTMTHPHVKSSVESANMRFNSSRFLSRSCFGGGHTVVDSFREGPQRVGRSLSFMGVSLDRDVGPPFQGVVGGPSGGRLPGSALPIRGDTRRGSFSGGVGVNVSVPFGGPLTGPLSGPLGGPGRDFPVHTCKGVMKNPIDSSSVNGGNCGNCGNCGGYGGCGSCGGCGMAILKNLQSRQRGLTGPYKKINEEQCKVLKTVAQRRHLLGYKQMSNWMSAFESKCRGKNDKRRPSATSSLRSGIPKPNDKMSKEKEAQLLDVMVKEASKTIGGKKRRALSTKFEIKTFLLNTVKAIGIVQTKWKLKDFGMHFWFHIKCIEKERDLNFYVKFFDALFQIMTGKGIYFQPNDLNFLVNLFKEFRIYDCKNILRTSLRALNRYARRNSKDFSILDNDEDILDVNRALLLGGASPTVAEEAANTAVEGEAAGAGTAIRPPPSGGNFFDFLFGSLKDNHDALQKVGQEKLYLSNVFANFNELNYGELFHLFLRRSGR

SEQ ID NO: 101 - protein, 149 aa, Plasmodium yoelii
MSNQVLETYECSLLKPQLVNTLYYPADITWKYVLSSKPSGCFGSTKKYVAVPETYTYSYPYYYYYVYYRPYVLGNVTLSIKNADQSKKKVNELNNQEKKEEPSDENGSKTSKKNDECNDRENNTKKYVSILTPPYYIGSLFYPTAIVFP

SEQ ID NO: 102 - protein, 151 aa, Plasmodium falciparum
MCSTYSVEPLVYDSYEYVYLKPKKAGTSAVYYPLNISWKYVAKKRSVGCFGSRKKYTLTPEAYYYPYYYYYVYYYPSAARLVRTTRKEKVLKENNNKESEDENKQDNVGTEKKECDCSEKEKYIPTYVPLTESYYFPPSALYVPHYSVLVP

SEQ ID NO: 103 - protein, 154 aa, Plasmodium vivax
MAPLVVDTLDCVYLRPQPTSTYYYPLGMTWKYVVSSKSTGCFGTTKKYTLTPETYYYPYYYYYVYYTPAESPIVCLSSKKVIKDKKKKKDEDKQELKDESSKEGSEKEEGSKKSSGKKKYEYVEREKVVRTYLPVVEPFYYTSSYYVPRAILFP

SEQ ID NO: 104 - protein, 227 aa, Plasmodium yoelii
MPKIEAIIAPSVLASNISKLAEETKRMEDLGAEWIHLDVMDMHFVPNLSFGPPVINNLKKFTNNIFFDVHLMVENPEKYVSLLKTSNQLTFHFEALNEDIEKCIELAKIIKSNNMWCGISLKPKTSVEKLVPIIDTNLIDTVLVMTVEPGFGGQSFMHDMMSKVSFLRKKYKNLNIQVDGGLNIETTEISASHGANIIVAGTSIFNAEDPKFVINTMRKSVQKYLQN

SEQ ID NO: 105 - protein, 227 aa, Plasmodium falciparum
MGTLKAIIAPSVLASNISKLAEETQRMESLGAEWIHLDVMDMHFVPNLSFGPPVINNLKKYTKSIFFDVHLMVEYPEKYVPLLKTSNQLTFHFEALNEDTERCIQLAKEIRDNNLWCGISIKPKTDVQKLVPILDTNLINTVLVMTVEPGFGGQSFMHDMMGKVSFLRKKYKNLNIQVDGGLNIETTEISASHGANIIVAGTSIFNAEDPKYVIDTMRVSVQKYLNN

SEQ ID NO: 106 - protein, 227 aa, Plasmodium vivax
MSSLKAIIAPSVLASNISKLAEETQRMEELGAEWIHLDVMDMHFVPNLSFGPPVINDLKKYTKGIFFDVHLMVENPEKYVDSLKTSDQLTFHFEALNEDTDKCIKLAQQIRDSNRWCGISIKPKTDVEKIVPLLDTNLINTVLVMTVEPGFGGQSFMHDMMSKVAFLRKKYKDLNIQVDGGLNIETTEISASHGANVIVAGTSIFKADNPKFVIDTMRESVRKYLQN
